United States Patent Application Publication US 2026/0265781 A1 - sequence listing, part 20

SEQ ID NO: 118 - DNA, 18231092 bp, synthetic construct (residues 14,179,740-16,205,416 of 18,231,092)
  source 1..18231092: mol_type = other DNA; note = Hot spot 2 - Chr 3 contig ref|NW_020822577.1 from Cricetulus griseus
ccacccggctggacttctgtttatgatataaaaaatccataaagaattttgttctcactgggcagttgtgtcccacacatttaatcccagcacttgggaggcagagataggcgggtctacagagtgagttccagaacagccagggctacacagagaaccctgtctggaaaagccattaaaaatagaattttgttctcagagtaacagaaaagagtggagaagaaccaggcaatcaacaattaccaacttttcttgaataaagcattgcattgacattgtaattaattaatcattgagggacaaagaaacatgacacagacacttagctgaagaagtcactgcactctgtagatacaaataattcagcaatctttttaatggtttcctaaaagaaaatttgtctcccaagagactagagaatggatgctggaagatacagaaccaagtcccaagtttctctgtggatgtcaccagctatcgtaaaaatgactgacaagattccgtgggaagccttgcttattgcatgagtgtagattcagaaacatcagttgctgtacaaaggcataaaatcaacctggatccctggatccctggatccctggatccctggatctctgactgttcttaggctattagggatggggcaacaagctctgtgcccttgggggaattggtagaaataaaattggtattggaggataaaaccccaaaccttctacccttgggaggtaggaagagggatacctgccaatcatgggcccacagctgagctaggggggaatggctggaaacatgctgtctctgagaatcatatgcactgtgactgtctcagagtcaagtttcatagcaaagcaaaacaattcctacaaagagctaggacgcttttcttgttagaaaaaggaaatgcacatggaagcccagactgacacccattacaaagcagagacctgaactgtgggggaggcattaatgttaccccctttgcaagccatgctcaccccaaagcaaagaaatagagagagtaatatgatgctcctgaatgactcactctgagctgtagcacatactagcatgtttttaagagggacacagcaatccaaagaatcattgccatataggaaataagaattgcaacagtaagattagagaattaaaataagtatggtcactatgttagtcagtttattagaagaggtgacaccatgctaggacagatggtgaaattcgttggagaggtagaatatacggaaaatttaaatgcaaatgctagataccaaaagcagacagacaacaaagaattctgtcagttgggttcatgagcccattagacataactgaggaaagaatttaagaactagcccactggtcaatagaaattattctatatgcaaggacaaagaaaaagactataaaaactaaggggatcggagtccagaaagtgaaccacctcaaagaccaggccattatggagatgaattatcagaaagagaagacagagaaaacagaacacaaaaaagatctaaataactaaatccccaaattaatagacatgaggaatcatgcctccaggaagtaagactatggggtcattagcaatgcaatgggcagtgttcattcgtagcattttgagtgaggtggggataaagagagttttatgtaaatgaaaagaataccattaacaactctatgataataattttaacaacttagatgaagtaggtagtttttaaagccaccaactatcaaagtccaattaaaaaatggcctgaataccactactttgtcttctaaataaattgaaaagaagataaataattcatatccaaaaaacaccagccccagatggcttcacctgaatattctattaaatatttaaggatgaaacagaagcaattttgcacaaactcttccacagcatgaaagaagagtttgccagcctctttcatgatgccatcacctcccaagtaccaaaattagacagatacctgatcaagaagaccaaccccagccaccaatacagatgtgaaggtccaaacaacctacgagtaaatcaaatgcaacaatatataaaaaagataatacactgtgatcaaggagcattgattccagaaatacaaagccaccttagtgtttaaaatatgatcaaagtaatatatccaagtactttttaaaaagcatcataaaattatcacaatgggtacagataaaaacctttttaaaagatttctattactgtgtgtgtatgttcgtagtatatgtaatatgtgtgccacaatgtgtgtgtagaagtcagaggacaggatcagttctctcctcctacctttacatgggtttcagagattgaactcatgtcaacagatttgcctttacccatctcaatggccccagacaagaacttggagagagttcagaaactgtttgtgatactcttagaaagtaggattgaaagaccagtgtgttaattgataagggttatctaccaaaaccccataggaagcatcaaatttaataatgaaaaactagatgcttccccactgaggtcagcaacaattccaagatgcctgcctattccttaccagtcttgctacccattggcagccattcctactgcagtgaagaaagaacaaaaagcgcatggattaggaagatgaggtaaaactgtctctgtttgcaaaagagaggtgcatggatgtgaaagtcttgaaaaggctacaaaatagttactacaagtaagttgaaattttttataatacaaagtttttacatcgcaatgaaattctatatagttagaacggccactctgaagccatggaatctcaccattgactttacactttgacaatcattatacttttatgtacttatccaccacaaagaacccaaactatcaacaaaagaacaataaaaacaattagctttatgccttctttcacactacatggccattttctgaattgcattcttccacatcacttagggtgtggagttcgctgggtatagacatttttatattcaatatttctgttttaaaatgtcagtgttctgtataataacacaaataattataaattaacatagtatcatttacagtagtaccaaaactataaaatatttaagtgtaactgttataaaagatgataatactgaaaagcctcagtcaaataaagtttaggagtaccataaaataaaggaattggggcaagaaagatggctcagcagtttagagcacttgctgatcttgctaaggacctgggttcaattctcggcacccatacggtggctcacaaccatctataactccagttccaaggaggttgacaccatcttccaacttctctgagaaccagatacacagacatacagtcaaagccctcacatgcataaaattaaataaatctttttaaaaatggagaggttggggagattgctcaattgttgaaataatagccatttaagcaagaggactggaattcagggctccagaacccatgtaaatgatgcatgggttgggcagcctacctgtaattttcctttggatctccggagcaagttgtctaatgatattagccatatcagcagctctgggttcaagtgagagaccctgcctgaaagaataaggcaaaagaatgattgaggaagatccctgacatcaacctctggtcttcacatgcccatacacatacatgcctacacatatgtgaacatacaaacatacatgaatatttgtatgtttgaaacatacaaagaatatatactaaaaaaaaatagaaagaagtaccttacatggagaaatgggcttcagaatttggtagttgcaatgttgctctaatgtcacttatcctcaatttaatcttcagctgcaatacaattcaaatccaaatccaatggtgactgtaatagaaactgacaattgtattctaaaatgtctttagaaagaccagaaaatgagaatagataaaatagtgttgagacagagccatggtggaaggcttacgtgacctgatacaatgacctacatgaagctagcaagcttagacagtgtcctaccaataaaacagtaggcatgaagatgataagacagaacagagagttcagaaatagtcctacagatgtatgtcatttctttttaacagaagtataaagcaactaatagtcagctaatactgctatagaaattgggtgtctgtggaatggagcgacgacttggtggttaagagcacttgctgttctttcatggctagagtgtgcaatacacccacattaggtgtattacaactccctgcaactccagctccagggcacccctgtgtgcatacgcatacgcgcaaataagtaaataaataaagttttgagccaagtggatgggtagatgacttagtggttaagagggcattgcttttgtagaagactgaaattcagttcccatcacccatgtcaggtggctctcagctgcctgtaaccccaaatcccagtgattcaacactctcttcaatgtctccatggacacttccttcacatgcacagctcccaccccacacccatacacagaatttttaaaatatttttaaaattgggtgtccatagataaacttagattcagacttaacaccttaaaaaagaaacaactcaaatggattgtagacctaaacacaaggactaaaattgtaaaaaaaagttccagaagaaaacatagaaacaaaggtttattgcctgacattagggaaagaggtctaaaaatatacaaaccattatctataaaggaaaacggctaaattagaatttatttttttaagattttatttatttactatgtatacaacattctgcttccatgtatatctgcacaccagaagagggcaccaggtctcataacagatggttgtgagccaccatgtggttgctgggaattgaactcaggacctatggaagagcagtcagtgctcttaacctctgagccatctctccagcccctaaattagaatttattaaaatcaagagtttctggtgtttgaagtaaacttctttgaaaataaaaatgcaaacctatacccaataaagaatttgtttccagaatatgcaagagtctgaatggaactcttaaacttcattatgaaaagaaataatccatttttaaaatatgcaaaatatatgaacaggcacgtcccacatggaaggctaggaaactcacaaaacacaccaccagtcatcaaactaatgtaaattaaaatcacagtgcatcccaccacctggcctttagaaagtttattttcaaaactgaaaataaaattaaagtaacttaaaaaaaagtatcagcaaggatatcaagcaactcaaactaatgtacagctgctagtagtattacaaaatgaaaaagacaatttgataatttcttataaagttaagcctctatttactatatgactcaatggcctcactgcaaatgaaatatatacataaaaaactatatcctcacaaaaaataaaaaagtataaggattgtgtagtagctttgtttgtaatcaccagtgacacaaaattacatgactagagactgaactatgggataccatatacaatgaaacactactcagcagttaataaagaaagcaatggttactacacacagcatgggtggctgtctgactcatgctcagtggaagaagcaatgttttaaggattctgtactctgccaatccatcactatgacatccttgcaaatgtaaaacccgagggaaaaataaaagcccgagtggttaaccagcactggggtatgaagaggcatggggtaatggggtggaaggtccaggtggtcactctatcctatttcttgattgttgaagcagttttgtgggtatggtgaattctataatatataatttgtaccacaatgcaaatggaaaataatttccttaaagtcagtggttttataatagtattggctttacgaactgggaactggagagatgacttagcagttaagagcacttgctgcttttgcaggggaccagaccaagatttggttccaagcacctacatggcagtttatagaaatctgaaaccccagctccaggggatctaatgccctttcctggtccctatggcaccagttttgcacatagaacatgtatgtacatgcaggaaaacacacatacacataaaacgaaaataaatacttttcaaataaatgaccactgtcactaaggtgaacactggtatggaatatattagccatctggacgtgtggagcactctggtagctccaaatgttcttgaagaagcaagcacaggagtccctctgggtcctgagtcctatggaggtttaacacacagtcatgttatgtgtttattctcatgcccaagtccatgttctgaccctgcacccagacggccctgaagcctctattatggtcctgtagcctggagtccatcactcacccgacatcctcagcttccacctctgctcctgaccttttgagcttcccagctttgtgcacagctgtttcctgaggggtgcatcttcccaactgtcatttgaaacttttgctgtagtttcaagatcatttctgatctccccacctccattcagctgcttcagtggggatctgccaatcaagattgtagctatttcaatccctgtgaactctctccttaaagtcaagcaggggctcactacatggttgagccccacacttggtccaggagttataaaccatcctgatctggtggtagtcccctacatcaaatcctgctgaacaatggtagtatgttccttgtgcctcttatgcaatcaagtttgcctcatccttctttgggtgtggttttcttcctttccccttaccgacactgcttcccatagccagccacccttatccatctgcttacacatcggggatctagacttgtctgtcaacttaccctatgtgcttcatgcaggccttacacatgagagatgccaactttctaattgttggattgacttgatttacaaaccctggataccaagcagctgtcatctttttgtggagatgcattactaataagattagggaaattattattttgtagtttcacatgggaccacacacctttctggtaatgtttgattgccaaactatttcctttgctataactgcccttaggcctttggttcatttgaattattgatgacagccatgtcttagtaatcccaaaccatgtaaagatatgaataattcagttttctttgttggcccaaacaagtaatttgaaatcagcagacagaacatctgccatttccctctgggcatccaacaggcactgtcttcctttccccatcacacgatagatgctcactgaggagctttccctggtatctggtctctctgagattgcaatgtggttttgaagatgttcttgggctggacctatgcttgcactcccaccagcaggggaggagtgttgccctttctccacatcctctccaacataaactgtcattggtgtttttgatcttagccattctgattggtgtaagatggcatctcagagtggttttgatttgcatttccctggtgactaaggatgttggacatttccttaagtgtcttcccaccatttgagatcgttctgttgagaattctctatttacatctgtaccccatttttaaattggatttttggtagtttgatgtctagtttcttgagttctttgtatattttggagatcagccctctgtcagatgtggggttggtgaagatcttttcccattctgtagggagttgttttgtcttattgaccatgttctttgctttacagaagtttctccgtttcaggaggtcccatttattaattgttgctctcggtgtctgtgctagtggtgatttgcataggaagtgctctcctgtgctatacattcaagtgtgtttctcactttctcttctgtgaggttcagtgtggctggatatattgaggtctttgatccatttccactttagttttgtgggtggtgattgatgtggatctctttgcattcttctacatgttgacaaccatttctaccagcaccatctgttgaatatgtttttctttttcccattttatatttttagcttctttgtcaaaagttaggtgttcataggtgtgtgggttgatataagggtcttcgagtctgtttttatgccaataccaagctgttttcattactatggctctatagtagagtttgaagtcagggatggtgatgcccccagatgatcctttattgtacagggttgttttggctatcctgggatttttgtttttccataagcaaacctcgtgagatcaagagatggacactgaaggacaactggtgcaccacggggtcacaaacctgataccacaatctcgtctagccctgctttggcactctatggggattaagctctaggcacatggatctaggggtcagtcaaggttggagtcaatgtcaatgtgttttcatcctctaacctgtgttttctctctaaggggacagtttcaactttttgatcagtataggaacctgtcagccaatgctctgttcagagaactgtgctggatggaggtggtggcacatattaggaaagacagtggaagctggttggtatgctcatacctgattcgaacttgtgagaatgaccacaggcgagggaaaccgagagtattggaacagcgatcattcttggattattaggaagccaacaaatgccaccctattctccatgagctccatgccattttttcaatgcctctaagactcaggaaatgatggacaggtgtcctttcttcactggtaacgttagagtggaaggtgtagtttaaggtatgtactgtgtgtgatcaaaagtgaggctcctttcacttccttagcaaagttaaaggcatgtactagccaaaaatccgaatgggtcaagaccttggagggcaggcccaagatacccagatacctgctgtactaaggaggaaagctagggatctacatgctgagctcatagccagtctcactctgtctgccataggaagaggagtcaggggtagagagaaggtagaagttatatttttttcaatacttctgaaagaatggacgttcttaatctttggaccaaagccttgagcaaggtgggacacatagaagaggagaccatggagacaccgatggccaggttacagtggggtcctgtgggtggagattcagtcacaattctccattctctattttagacaacctcattagctatttctgcatgaatggctcaccaggctgtaatctgcagcctcattcccccagtttcccttaggaaacttccctggatattttgtttatcagcctgcaatagtgatgtggggtgtgggaactgtcccatcaggtaaatttcccacttgaaactaagaagactgagaagggcaatctgagtcaggctgcaacagggtgaggtgagttctctgggatttccatatacaagtgcagcagggcactgggtgtctgacagcattttactggagagtaccagtgtggtgaaagtgaagagccagctgttagccacccagcatgatcccttttcttgcctggttgcttaggacaatgctgaatctgggagaggaggaggaagatgacagcaaatatttatggttctatgtgcaagatttcgacctacacacacacacacacacacacacacacacacgtagatgcatacagtgataggtcaaatgatatgtccccccacaggcttgggcatttgaatacttgatccccagttggtaagcttgtttggggatgtgtaagtgacttagactttcgggaggaattatgtcactggaggcaggttttgaaagctaaaagattcacattcccggtttgctctccacttcctacttacagttccagatatgagctcccagctccatgcaccatgcctgcctgagaccaagcttcccaattgtgtagtgatagcctctcatcctacaggaaccacaaacctaaataaacccattcttctgtaagctgccttagtcatggcactttatcagagcaatgggaaagtagctaataatatacatgtgtgatatttaaggatatatgtttatacatacatatgtatagtcaagcgtatggtttggtttttttttaattaaaatataattacatcatttctccctccctctcattcttccaattcctcctacatccctccttgctccttttcaaatcatgacctcatattatttcattattattattggtgtgtgtgtgtgtgtgtgtgtgtgtgtgtgtatagatgcaacctgctaaatccatttagtgttgtttgtatgaaactcttttagggatgaccacctgggatcagataactatttatttggggtgctcatttctgtggaaggctaattttccctctctctgtaatttttaattgcctatatccagggttagggtccatgagacctaggagagcatggattgtccttgttcaggtcttaagtaaccacactgttgagatttcatgggttagttagttcccctgccacacacagaagatgtaatcttacagcagacttcctggccctttggctcttacagtcttatcagtgcctcttccacaatgtcccccaagctttaaaggtaaggaaaatgataaagatgtgtcaactgggtctggacaccccacagtcaattgttgtctgcattttgaccagttatagctttctatagcagtctccatctgcaaaaagaagagatgagagctttatttgtctgaggatataaggataagtgtttacaatgcagttaagagttatactggtttatggaagtggtaatagcatgttctcctctgagatgtataacctcactaacagtgtatagttggctaggtttcctgtagcagacatgatttccctcctgtccaactggccttaaggccaattataaagtggttggttacctttcaaatatgagtattactattgcacctttagggatattcactgtacagatcattgctgtggttcataggcatcacagctgagtagggttaatgaatgttttcttcccttggaagcttgtgtagcatcttctgctattataaaagctaatcttcagaggggaggcttttgagtcggattcttccaaattctgtgttctttgttcacagatatattaaggaagttgtcagttacagatacaaaagggtaaggaactttacccaaagcatgatggaggtagttaaaattcagtcctgaatccttgctcaccttactacagactgatgaactccaaggatggttatctgctgcaatcagggtatcaggtggcctagtgggagtccagccatctggtatagagaggccatgtctcctctggtcatcctggtatgttcctagaaccatgtgagcagggaaaaaaaaaggaagacaatgggtctggacatctagataggatgtttctttttgaaagacccaccacccctcatttgtcccattgttagggtacaagtacctgaagcatccctgactcaggggcaatcctgagaagtctggaagcctgaactctgaatttaaaatgagcaaataggaaaacagaagtccttttcctctgaaaaatcttcaaaccaaagcctttctgtatctcaagatctccaagtagatcctaacatttgaattagttgtgggaattacaggctataagctgaaaactactctttccatccacttgtccattccctcctcatctgatggcttcactttgtcaataaagagcagaataagattcatgcattttctgacgtacttgtagaggagatcttctctgcccttctgggttcctcagtaacttcatctctgcaaggctgataatcacaatgataatgatcctggtgtggaaggggtgggatgttttataaatgtgaagggaagatggagttattcagatctggccctgtgctttatcagagtcagtagacacttggaggggcttgaaaatgtcacctgaagcggagacgatttcagcttgcctgtgggcattgagaagacaggaatacagaagtgatgtggtggtacacacctgtaaccccagcacttcagagactgaggcaggaggatgagggtttgaaactcaggctacactgtgcagcctgaactacacagtaagaccctgcttaaaaacacttaaaaataagaagaacaacaagacaaggtcaggaataataggagaatcatggtgccaatttggaatcatttcaactcttctaaagaaagaagatgaaatggaagtcccgcccccaaaataattgaaatgtgtttcctaatgacctcatcccattccaccctctggccccctccttccaagatttctccatgaatagtctcctgtcctcaacctattaaggtttgcctactgatttcccttttccagaataaaatcaagagattgttgtgtggatttttgcagcagaaatgaaagattaataaaaatgtatggtagtctggagagtttccagatccttaaaaagatgaagcattgggaccagtgagatggctcagcaggtaaaggcacctgccactaagcctggcaatttgaggatgctatcagaatacacagagtaaaagcagagaagtgactcccctaagttagtatctgacctctactcatgggctttagggtgcatatgcacacaaaaaataaaaaaaaaaagattaagcactgatgaaactaggataacggaagggaggacgagagggatggagagctcagggaggcaaatggcatagtatagtactttcatagctttattgaaaaaggtcttgcttgagtgccaacattacaagacatcattttgtgataagtacatttctttgggagtttctgtttccttagttttgaaacaaggttgaactagctgtcctgaggttcttgtatccttgcctgtctcatccattagtcctgttccttcaggaagcctccattatccccacatagcaaacacagaaaaccagacatcagtaatttaaatagttcctgccacctacttgggaataaagaaccaggacagtgggtgtgttcctggacaggagatatcttagagccccccaaagtgctattatttattcttttatcatcagtaacaaagatttcaccttcaaggttgaaataaatgaaacgaggtctcacagtgattaagtttcctgaagtaactcaaaatattagtcagcagctaaccgggagtctggaagttgttcacagttgcagcatcttttgtctttgtcaggaaatttttaaaaatacttgtttacatttctacaaaattacggaaacaacaccgtggatgtgtgtggatgaaaaattaagctgtggtttggctagttgcattaattactctgaagcacagcagacgacgaggctgatgcatttccactccctgtaatgctgacaggagtattcatcagatgcctgcccctggctgctgctccgcaaacccatcaagcctggccactgttaagcttccacttgtgtcctagtgacgaggaatctcttcactctcattaccacctcccaccaatcctaagaaaacaataagcaaaaatgggttttacctgtgcatagtggcaaaacattcagtaatccctgaactaaggggcagaggcaagaggctcacaagtgcagcctgatcttcataacaagttctaggccagccggggatgcattgtgagaacctatctcaaacaaattaacagaggtggaagaaataaagatctagggtaatattgtggtttccctaagttttgcttcattgtgtgatgtagaacacctgatcagacatcaggacttggccttcgcctccagggaacatcttgactcaagtgctctgcttagggaaggactatttctgcaacaaatattacacattttggatcctagggtttttttgttggtggtggtgtttttttgttgttgttgttttgttttttggttttggggggtttttttgtttgtttttttggtttttcgagacagggtttctctgtgtagctttggagcctatcctggaactcgatctggagaccaggctggcctcgaactcacagagctccgcctgcctcggcctcctgagtgctgggattaaaggtgtgtgccaccaatgcccggctggatcctagattttatatagattatataaacttatcttgttatagacaagatgaaaatagagacaatattgtctagggggatgaaggagactgaagaaatagaaaagacagataaagaagaatgtaggacggtaggtggagaaacatggccaaagtacatttctattaaaataccttataaagtgtggtgtcacacacctttaatcctagcacttgggaggcagaggcaggtgaatctcaatgagtttgaggccagcctggactacaaagtgagttccatgatagccagggctgatacacagagaaaccctgtcttgaaaaacaacaacaaaaactatcttaataaaatccagtactatagacaacgtaattgatgcatccacaacacacaacacaatccctatacctaaggctcagagaataccatgtaagaggagtgggaaagactataagaaccagaggccaggacatctgctacttctatagatgacagggaacttataatcccagaatctcagcaatatggttgcctaagtaagaccatgccaacatggatgggagaaatttcatgagacccaggccctagataaacaacttccggcaattaatggctgttgagagagggagactcagtcctcttcaaggatgggccccttggtgggctagccaattccaagtggtcagccacaaacacatgcacgtatgagcaatactaaatggactcagtaggctgcatttgtgtgtgtgcatgtgtagcaataataaaagaaaggtcatgaatttgaggtggagttagggaagacagcaggagctggatgatatgaacatagtcctctgaaattcttgaaattcgaaggcaaatggatggaactagaagaaaccatcctgagtgaggtaacccagtcacaaaaagacaaacatggtatgtattcactcatatatggattttagacatagacaaagagattaccaggctacaatccacacctccagagaagctaggaaacaaggaggaccctaagagagacatgcatggccccatggtgaagggaaaagggatgagagctcctgaacaattgggagcatgggggaggggagaaaggatagagaggggggaggaagaggagcggggagagaggggggaagagaacacgggggagcaggaagatgaagttgggagatgaatagaggagaccaagaagagagacacagcaatagcgggagtcattataggtttaaagagaaatctggcactagggaattgtacagagattcataagcatgaccccaactaggattctaagcaatagtagagaggctacctaccttaaatgcctccccctataatgagaatgatgaccaccttaaatgccatcctagagccttcatccagtagctgatggaagcagaagcagaggctcacagctaagcactgagctgaactcctggaatccagttgtagagagggaagagtgatgatcaaaggggtcaagaccaggctggggaaacccatagaaacagctgacctgagcaagtgggaactcatggaccccagtctgacagctggggaaacaacatagcaccaaaccaggcccctgaacgagggtgttagctaggagcactgggcagtctatggggcctctggcagtggaaccacgatgtatccctagtgcacaaacagacttcgggagcccattccccatggagggagactctcttagcctagatacacaggggagggcctagaccctgccccaaatgacttgacaggttttgatgatccctcatggaaggtctcaccctccctggggagtggatggtggatggaatggtgggattggtggggggcatgggaggaggagagggagagggaactgagattgatatgtaaaataagattgtttctaatttaaataaaatttataaaaaaagaaattcttaaaaacattaaattaataaaaagaaattaaagagacaaatgaaaagctatccctccataaagaagtgggtttttttttttttttttttggtttttttgttgttgtttttttggtttttcaagacatggtttctttgtggctttggaggctgtcctggaactagctcttatagactaggttggtctcgaactcacaaagatccacctgcctctacctcccgagtgctgggattaaaggagtgtgccaccactgcctcataaagaagtgtttctacaaatgcaatatccaaatgtcattaagtcccataagctcagcctccttccttgctatgtatctgcataagccatttgacctctgcacacctcagtctcctcacatctgaggtggatttctagagacgttttttaaatcagatgtattgtaccactattcggatagccacgttacagaattgggctagctgtccaccagctgctcaacaatgaaaaaaatgtgaaataaatgcacaacacagtaaggtctatccataaaggatggtgaaggtgaggcatttccatgtaaatgaatgcaatgggagatcatgacattatatgaactaagtcattcaggaaaaccaatgtcatgagtttttcacatttgtagatgttctattttatatagttatttgaaaccatagactatataagatatgaaaatagaagtaagactgcctgacagaaatgaacggagataacaagacagagagatgggaaagggcaggagagagatgaatgtagtccaagtacatgatatccgtgtatgaaaattgccagtataaaaggatgcctattaaagaaaatgattttaagacacggatgtgtgaaacatttggagcagtccccagaacacagtgaccaatgagtgagacttctgtcatttctcatcaaagaagcatttttatttcatgctttcaattttcccatttgtttgcaaagatttggccctccagatacccagattacaatatgtgttggtacatgttctaagatcaggtctattgcagaaagagaccagaagtgtctcaataggattatttggctttaggtgcaagtgggaaacctcttccaaatgcaccatccttctctgtgcttgcccacaggcatcactattgcctttcattcgttcatctcccttgaagtacctctctgcactgcttctgagcaacttgctgcgttagagtgatactgaacacctagcgctttgtctaaaagtaacctgttgagcaatgctcactgtgccgctgcaccaaactgtctgtcctcacagcacactacagcatgggtgtagggatgaagcagagtcactgcccccagccaaaagccagcaggaatagggagatggccagctgttgtgagaaagttcaggaggcactttgataagtgagttgtaggttttgggtttctgtttggtgatttggggatgtgcttgagaaagcaaggctttgctcatgattggatgctggtaggaagtgagggagcatggaagagtggatgtcttagtaggtctcacctatatgggtgtcgttaatgaggtaagctaagtgtagagaataaatcacagcgagtcagcttgagtgagatatgtcttgtcatttccatggctcgaatggtggttcacattcttgtgtgtgctcagctacgattacacagtctcagttttgccttggtccttcataaatgcccacagggtggccctgtctgtgacagtgttctataaaactgtttcatagaaagctgaaggctcaaaccagatcccagaaacccaaagacgtggctgagggctgcacgctagtcctcaggtgccatggctggcttttgtctttctcagtgacaaaaagaagttggagagcttgtccacagccacacagctaataacctgagggaccacaatgctaatacaattcttcctgcccctacgtttagtcacatggtagtgatacacacttatgaaaaagtctgttttgtctgcctgatttcccaggagaattgctctgagccttttgacagaatccattgagagtcgcattcagtctccagaacagggccgtctgctggtctctgtaagatcccaagcctgactgatctacctaatttcagtggcagtccctccccttcccacatctttggtgaagagaggcttttgttcaagtgttcacacctatgtgaaggaacgatgctgactgatgatctccagtgtagagatcgttattttagattgtgtcatgattttatggtacatgatatttctcatttgtgactttatactgagtatctgaagatggggactgtactaacttcagggctgggtaacagtagctggtcagagactgtctactggatgaatgtctggcccttgaaataactgttggtccaaaattcaaacaagctgtgttctcaaccagacgtcctcacaggagaccaacccaatagcccttgatgctgagactttaacagaacagcccttgtggtgcaaggatgactcaaaggaagtcatttccatctttgcctgggtgtatctaaccaccattcacaaaacctgcaatcaaattcccaatttaccactgagttcctctctgacttgtaattttacttaactctatggccttcactttccttcgcatgcattgaggaaagagggacaaaaaaaaaaaaaatacttctatggtctctttgggtgtgagtctcctactgtcaagagtatgcaattttagtaagaataacaatttgccataattgttaatgattataaacactgttcttaactgtattaaccagtctgttatagcatctctatctgtgtggttaacactattacctccactttatgtatgaagacactgaggtccagagattaagtttattaccccaaaatcacatggttctaacactgtgaggctggagccaatttccaagcagcatggctccaggatctatagctataaccactctgtaaagatgcaatagagggtcattgtcttgctgcttaagtatccctttaaaaaatggtattgaggggaaaacatgtgaaaagccaatattaaaactctagctggtaaaatcgtctctgtaaaaggccaaatgcagaaagggaggaaaaggtctattcctgtatatgaacattttaggggacatttcttctatatgctataatgtggtcctatttacatacttaagtgaaaaaaaaaaagcatttaaaaaaaggatctctgctacagcactcgtatgcatttttctctgaaaaaaaaaaaagcatcaattgcaccccacgttgatgctctcaattttaatttcacagatgaaagaactcggtgtcatcttctacaactgcagctgcctggtcctagatttacaaaggatcttcgctttatatagctcattaaaattcaagagcagagtaccccagacctggtccaagaggctttacggagtctatgacaatgagaagaagcttcaacttcagttgaatgaaaccaagtcacaagcctttgtgtcggtgagtcatgcaccctcactgccttactccccccaacctttgtcctccaaaggctctgtgtaccagcccctctgactcatcccagaccccctcacatcccaatctcacggcctctttttctcacaatgcaagagtctagttagaactgcccgtgtgggcttgggtgtaaggctattttgactgagtaccagagtaccagagaccacacctttgaggaaaactgactctccctcccctagaagccatgaactgccaatagtctcagttagagatgatccttgggcccctcctgtgtcatggaccgctgactggcttggtatttgtaggtcttgcatgtaaccactactactgtgtgagttcatgagtacaacaaccctgtcatgtccagaagacactattgcacaatggtccccactgacccctgggtcttccaatctttccctatctatcagtcgtggtgactgagctgagaggggatgacacagaaaagaactcaggactgctacaggaaaaaacgtatcatactatattccttcttaaagcttccactttattttagtacttgcattttagcagctttattgagttataaattatttactgtgaacttagtccttttagagtttatagttccgtgagctttggtgtatccaaaaggttctacagtcattggcaccatcaaattttagaatgttttctttgccacaagggactcgccataatcattagcaattacattctgttttcccctccctgagccctggaaacctctgatccagaccttcatgtgtcttcccttttatggagatcttatctaaatgtaatattacaaaatgtagtcttttatgactgtttttccacctaccatgtccacgcatgttgtagcatggatttataggcagttcctttgcttctttttatggctagataatattgtattataaatatgccatttttgtttaagtgtgtgttggttggtagacgtttggcatttctatatttgagctcttgttcatatgtcccctgtgaacattcatatccaagattctatctaaatatattttcaggtctttgggatttatacttaggaatagaattgctgattgttcatcattttgaggtactattaaactgatttccaaatgggttgtaccattctaaaatcccacctgccatgtgttcatgttcttgtcaacactttttttcttgtatttctgtctcatgttaacctttctggtaggtgtggcataagtgtcgctgtgtactgattacatctttcagctgtactgtgtgtctactgggagagctcctagggaggttttctgcattctttgtacaagctcttagcaattagacaatttgcaagtcttctctcttatgctatgggttttctttctatatttagttatatctcaatgtatatattctagaaagacaacatgaactttttaaaaaacgggagaccattgtgaagtaaatcagaaacctattaaattctctacaaagcacctacggactgagtatgcaaaataaaatatgcatacatccagcacttactgatccaagagaaaacctagattaagccagacatggggtgcctcaagaatgcgtgattggtaaaggcagctgaaacataaaacaggtgctatagtcttgccttctacttcaactgtggaataaaggaacataccttgccaggattagcacattccttctagagtgctgagggggatgtagcagccactctctgcacagtgggagccaattagcatcccaacagagcagtaaatcactcttttgtgttgctatatattaaggaacattatactgtttatagcagtagaacgaagcccccagatgcgggtacattggtgtaaacaatcttatgccttcccttaacagacacatggagcacctgccaagccccaggcattgtgttaagcaaagggaattcaggaaagactaaggcagattaatgctaataatgatttccacatgtgtttgggggaaatttttagaatgaaggtactccaactaggaataaaggttagggtgagacaaacctgcaacatttatcagttcatgaaatacattcacgttcattccacagctacttactgggcatgtaatgtgtgcatggtacaatgtgcagaagctgtacaaaaaaaaaaaaaaaatagcacagcccaagagctggcagatacgcaagcacaccaacaaatgaagcagcatcatgtatcaggtgccagaatgaagctccacaatgcacagtgcttaccttatccactgccacatgccacttgcctagacctgagcccggacatgacaggcacttgggatatgtgctgacagagcaacggcatgcccagtccgcattcagagaatagctattctcctattccatcctcagagtgcaccagtgtgagaaggtgtgactcttattaactccattaagaagcaggctgtggtgcttgtaatcccagtacttaagagacagaggctggaggattgctacaaattcagggtcagcttgggttacagagagatttccaggagagctgaggttacacagtgagagtctgtcttgggaaagaagttagaaagaggagatcaagggggcgggaaggggggtgtaaatcgagaaggaagggagacttaagcaggtggtgtatactaacattcttgatctgtaagtctggaaactagcctaaatcactgaagccctcactctccccctggcatcagggcacagtggtgcccaaccaatccctacctaaatgtgcttctctccaaaagcaaagcccagtttggaatcccaggatgaaactctgggagttcttaattgaaacaaaaccatgagtgttttgacaagttttagagcccaggaatctgtccaaagagaagttcctcagctgctccatggcaccctgagccatggctaagacagatgaaaccggctgaggaaattaaatcatttgaatgtatgattttaatgatataggaaaatgaataaacacaacccctaaaatcaagctagaaacagtctagctgacagagaggcaagtgtaagcaattatatctctgaatgtgctaaataagatagaaagtaaattctggaggtggatcatgggaagggttgtacagcagtgttgagtcacccaatgcccttggacaacatgattgaagtgatgaagctgagactgggggtataactcagtgataaagcgcctgcctagcctaaggaaagccctggttcccaccaccccagggatggagagatggagtgaaaaataggaaggaagaaaggaagggagttgataagaaagaaaaagaagcatactgccgaggagcccagaggtagcctcggtctgaagatctgaggaataaagaaaatgtttcgtggaagacatgtatttgagctggaatttagagagagattcagtaggacaagcagggaagcatgtcaccaagagggcctcgctgagcaaatgtcaagaagcagaggtgacaaggacacaatcatgggctggaaatactggggtgggggcagaataacagccagggatcctcatcctgagacaggagttcatcctgaaagccaagggtacccagctgttaaatgccatagagacaaggctgtgggtgaggaagagaatttgaatgcatcgcccccagtgaatggcagtttatcttccttcaaaaaataaaataactaagccaaagtataccttgcctattgctggccaggaggactttttattacttgcctttctcattgctgtgtccaaatatcttacaaaagcaacttgacggaggaagagtttattgtgacttacagttcaagggagggccaacatggtggtgaaggcatagaaacaggagcatggggcagctgctcacatcacatctgcagctgggaaaacagtggaagctggatgctggtgcccagcccgccttctctttttatgcagttgaggattccagcccacagtaaaggtgataaacctcagtttacctaatctaaaaattctctcaaagtcatgcccacgggctgatctcttcaaagattctagagcctgttgtgttgacaatcagcgttaaccagttgacaatcactaatagccatcacaaggactgtcaggacagggatgcctgggaagtgtttaccctttatatgcccctagatagccactttgccattgggggtggggtgagtattcaacccagcaccttcattctgtgagtcatgaaacaggatgagattcccaccaatgcaaggtgagacactgggggcaaatgacttgggaactcttattgtcccacgctgccctttattccaggcagttccaagatacgtttatcctctcttctgtgcacctgtacctcccacaaggaactgcttgtcagagaaaggatggacttacaggagacgctctgtccaatcctccccactgcaaaagcaatgaaggccctgaagtgcatctttcctttgctagcccagctgcacctacaaacaatctcagacatgtgaaaaatatctccaacgtaatatgcctctttcctcattttgctgaggtctggtgcaatatctttcttctctgactctcttgatggatctgggcatcacagtaattccagtttccttggagggttatagatggccttctctacaatcagcactcctcttcccaactctatgaaagatcaaggggggggggagatttttggatttgtgtcttgggtatttttatggccaacatcacttctcagatgaaatgacttctagaataaattgcttactccatgtgtgtatatgtctgtaaatgatactttagaaaactctcagttatgcaacaggaggaggatgcaaggtgtgcgtggaaatcaaaaattccctccggagacagagatcgacttgagacacatcccacctcagttttgacaaatgaaaaatagttttcttataaactgatcaagaagcagcaaggaagctgggcagggcatggcagaagcaggtggatctctgtaagtttgaggccagcctggtctacagagctagttccaggagagccaaggctacacagagaaaccttgtcttgaaaaaaaaaaaacaaaggaaaggaaagaaaagaaaagcagatagggggtatgcataccatgtaattagccaagacctaccaataaatcaagacctaccaacacaaatttaaaaaaaaatttaaatccacaggttcctacagttcaactctaacatctcgggctttatatcttcacagaattctcccaaactcttttgtcctaaaaacagaagctttgacattgatgccatctacagtgtgattgatgatgccaagcagtacgtgtacattgctgtcactgactacctgcctatctccagtaccagcacaaaaaggtcagggactttccagcctatactatgggattctcaggcctctgggctctgagatcctgtcatgctgtagtgtgcacctgcaatttgtccatcatgcctttctttctccaagtgtgtccaatttaaaggctctcactctgcaggagtacctcactagtttatcctataagcacgggagcaatctcagaaagaaggttgggcaaatgtcactttgaaaattacctaaagagaaaagcatatgcctttgtgccctcaaggatgaagaggagaaaggaatttaaaatacatgttttcagacagtatgagaagaaaagggtctttacaaaagcggataacttgcaattcctcactgtctgaccatatagtaacttggaaacaattcaggggcagagcatgtggcaaagctctcgggagaataatcacacctaatgtgggaccacacccaggcattccctctttagcttgtttgctgcaagggcagatctttgggtgcttgtcggtgtttttcaataattagtttaaccaggaaacgctttccaaaaatgtgcgtttctgactgcaaatgaagaccttcatcattccgaaaattataatttcaaaatagccatttagtgagcttaaatgattaagtgtgccatatattacttgaatattgttcatcttgccaatcccacatatgcataacgtgtagcatctctatgcaaatgaccgtaagattgcaaaaagcctgccagaaatgggtcatttcgtaacagcgggaaaacactgtgagctataagaggcatgttattaagacagagctactttaagacagtatgcatcttctgaatgttcatggatttcccacacactttcccatcattcctatgcctcctctttatgcccctcccatttcttgtttatttggctttagatgaaattttagatgtcagctttcctctggaaacatagcacattgtgtctggttgccctgtcaccaaggagcacgggggaccaggttcatgtggtcctaggtgatggctcaagattaacagaactttgtccaatggccgcctatggccaaaactgaggtcttttgcagttggttggaagggttgtggtgtgtggtggtggacacctgtattcccagatttggggaggctgagacaggaggtcacaagttcaagatcatccaaagctacatcatttaaatccagaataggttacagggtgaaccctggtctcaaagaaacaattatcttacaagcagggaaaatgtaaagaaacccaaatatccagagaccaatcagctatttgtcattctgactgttgttcaaatacttcttgtattgtgtgtgaagatgccatgatgaaactcattgtttcatgggctaacccaaggcagccagtccatctgaacactagctccacatggcttcaccccgtgggcctgagaccttctataaggtccatatataggccttgtattagaccttctataaggaggtgcctcactccaaaggcctgtttcactgatctaccctgcaaggtggttggcatgttgcagaatagagcaatgcacaaaggaacagcaaagcattctgttgtttgtttctttctcaaatggctttcctcctttgtcttctgcaggacatactggccagatttggacgggaaaataagagaagcattagttttacgaagcgttaaagtccggctcctcattagcttctggaaggagactgaccccctcacatttaacttcatttcatctcttaaagctatttgcactgaaatagccaactgcagtttaaaagttgtaagtgttttgttgaccatgttactaaataaaaaggacttattccctttgcatgcctatgaaagctgtcagcacacaccatacacacacaggggtgggggtgggggttgtcatgtagaagccagaggtcaacatcagatgttctcctcagttgctctccaccttactttttttaaaaaacctgaagctcactggattggctagactggctagccaccaagatccagggtcacctgcctccatctacccccatcattaatgttataaacagcagcctgccaggctttgtgtggaactcatgtgtgcgcagcgagcagttggccctccaaggcatctctgcagccccttcaagcatgcactttatttggaccgcttcatttgcctactaatttatttgcaacattgacagagcatggaaatatccatcaacacacactgaccttgcccaccatcccactagcccagactgctgggcttgccccagtctcttgggtcacatgctcatccatctctagatgcccagaggaaggcaaggtggggaactgctagtaaccctgacaagaagtggctggagggagacagcattgagctgagtccacagtcccatggtgcctgggacttgtgccttgctggcatgagtagacagtttgactttttacaccttggcctgtcaggaaggacagaccttgggctgttactagagacaggatctaacccgtaagtcccacccctgccctacttacttcttcatgtaggccttacctcctcccaaaatatcacagtccactagtctaagtattcaaatgtgtgagcctatggaagacatttcccatttaaactccagtacccacgaaatgtgctaacttaactttcaggctttcttgcctcctttcagttttcttgcctcctcccctcaggacctttgtgggtgctatttcccctgcccacaaaactcttaattaatccttccagcctcagttttcaaagcaagcccctcaacatgctgtatgctgagaccccaattgtgacaggcattgtgcttcctgagacacctgtcaacacgtgatgacagggtctctgaagtatccctcttgaatcatagcttccagcttatccctgaccctcgatataccagaggcaaacataggtggagaagaacactggatggttaggccaaaggtggtaggcatccttccagcttttgttccattacggacatcacttgcagggtaacaccaaaaggcaagggaggctatgagtgtgttcagaatggtagctgcatctcactggacaaagggaataggtttgaggattttcctgatctgatagtctcagcacccattatctattttccttccttcccataatagggaaccctagaatttccatacctatctctctacaactctgtacttagcttcagtttttaaaaactgaagcagacacccccatgactatgagttcgaaaatcattgtaagtattggagctaggaaaatgaatttgtggttataaacagtcatctgtttttcaggccatatttgaatgtctatgaaatatccaagacaggataaggttgctcactggggttcgaaatcaaatgcaggcagtggaagcagaggttggtaaggggagccaggcaaggaccagtccagctgtgtatgatgcctctttatagagacgagaatgctggggttatttcagctgagggacagcgtcctccaggacactgaagtggcactccggactcaagggaagtcagatgacgcagaaaccagatatcctgtcactgtttcttcctaatgtctgacataaagctagtagtgctcaaaatatgtgctaaagtggtatgcacaaatgaaggcagtttaaaaaaaaaaaaaaggcaggagatctgggaaaggcagtggtaagataggctctatcgccagtgaggagagcaaagattactcagagcaacacgccagtcatttttctctctggtgagtttcattgtggctatttctagaagcggtgtttacagagcatgggccccacatgagtagctacacgcctgaataaaatacttctcccttccccatcaagcacaaactgcttctaaattaccagggaagggcggtaccacatgatcccgacccctgcttccatgacagactgctcatggacccagtcttatggaaattttgtgcaggttatcacagtttattttaagttcaaaggtgcaacagctatgtcatgccaagaagcgagggttttccacctctcctgctccttctcccagctctcacgtcccatgtgccttggagtatagatgttctatctatggctgggcattcagtagtcatttctcctcaatactttgaccaattatgagtctctgtattaactactgcccactgcagaaagatgcttcatagaccaaaactgatagcaacgctaatacatgtgcataaatgtagctatttagatggcaatttgacaggtacagtatgtccatttagcaaaacaaaagcaatgactttcccaatagggcatatgccctgccaagatgtgggcctttgcctgggtttacagtaccagacatggactccctcctatggaccaagcatcattcagatttttcttagttattgtctatgatctggtatccccagtgagcttcacgcatcccaggggtcagtgagtgacatcaggggatcttctgtcaagtgtatgaggtttctaggagcttggcatacagcatggtacattcattcccatggtcactcttgatctcccttcatccaaagtcaggggtcttgcccaccatgctgctccctgcccccacagcaggcttgtatctaaggctcttgcatttgaaatcctacagggaaagaggaagccactgtagtagcctctgtagaacaccatcggcttcaccattttggacacagatggtcatgaatcttgaataagccatacattaatagctcactgctggccattttataaaacagaggccatgtatttttaaatgtcaagacaagcatgggtgggaaggaaacatggccccatcatctaggacacagatggctagtgagctcttacaagaaaagtagggtatagaaactttggatacagtatgtctgcaggaggcacagagccctgacagggcagttagatggtttgggaccaggcagggctctctatctctaagtagatgctctcatccggcccagatgtagcttggtatcattgaggacatcagagggagactgctacttgcaagactatcacagttcagggctacagagatggcttagcagatacaaacatgcactgttcttgcaaaggaccagagttcagttcccagcatccacatcaggcgattcaggtaacttacaactatctatacctctggcctctgtgggcacctgcacttgcatgcatatacccacatttcaacataaattttaaaaattttaatctaaaaatattttcacagctaacttgaattactttatttaatgaattacccaattctcttcaatctgtttgcttattagacctctcagcacattagacctctaacaatgccccccccatgaagctcaaaatagattttttggaaaatctagctaggcccttagtgaccaccagccttacccctctcccagcatgaaatagaaggctagaccaattctcagcatttccccagcccaaattaattacacatgaagtctcatctttctgccctctgcctctcttcccatccagcacacagagactagagctggtagcccttctagaatccatgttctccactgcagaggggatccgagacccttgacttcaatgtgtgtctcctctaagctcagctttcagagtctcatggcctcattcacaatggacactttactcaacgcctgtcaaatttctaaggcctgccttcactacactcaggcctcatttcccaatctcgttcatttttggccttgggtgcagtagaatgctatgatgatgatgatgatgatgacaatgatgtcatgctgacattatagaattctatagtttgaatttgtgatttttttttaattgccctttcaaaaagtctgtgaccttaggtgttccaacggaaactatttgttctttcggcaaaatctcttttgacctttgcagattctcagatgaatcagctagacattgacataatgtatgcaccggggaagaacattcattcagtttgttagcatgcgtgacacagagggcctggaggctgcttccagtgccagcgtgccctgctgaataaaacagcgacaattaaacaacctccttgctcgcaccctgttcagagaaggaatttttgtgttcatttgttagctttgcagagttaatcatagcgctagttgagcatgctaattttctttgttgttgcctatatggatggagagcaaaaatagcttcctctataccaagtaacaagagtgtcattttaataacccaatatgagttctattgttgatatttggagaatagactcctttgtacttgtgaataagacccaaaacattctcaattgacctgctttgatttcttaccttttctttctttctttctttcttttttttttcttttggctttttgtcttacagaaattttttgacctggaaagagagaatgcgtgtgcaacaaaagaacaaaagaaccagacctttcccaaattaaaccgcaacaagtacatggtgacagacggagcagcttacattggtgggtatgggggttgaaaagctcctctttggggatcacccagacattaggggtgtgctagctattgtgcagctaaaaagtagaagggtgaaggtcaagagctcttcagccaggtagaccatcctctactccattggctggtgatcatggaagacgatttgctgtctacattcagcagacatcctctgacccatttggctcattttataagcaaggagacaaagggctcatgagatgtgagttcctgcatggaacagacacatgggccaaaaatgtttattctcctgtctacagtgtcataaggcatcctatcttgggcttctggtgagtcattacgctgtctgggcagcgaagacatccatgccatcttctcatgacatcgctgccattttctaaatatctaatgtggagcagttccctggagctccctaaatttcagtttgctgatttgtaaatgaggctggtggcagtttttaacttcatggagtgacatttaaatgagagataatatacacaaagcacctggcacatggatgatgcccaattaatgttagctattattattattgaggcaataaagttccaggtgcatcagtcatgattacattggtgggattattctaactttttgcagtgtgtgggaggtcagggtaattccttcactgcagtcatcacagatagagctgacagtgtctacaaaaaggagatgctcaaatcctaaacaatcaggttgattatgacattgcacaggaagcggcagctccagcggagaagacaaacatgtttgtggggtgcaggaagggatatggaatccctatcagttatttctataaattccgtgggagaataaaaaaaaaaaccctctttacttcatgaagcacttttaccttatttagtcatcttagtatcactaccaacagagaggagagtgtgatccaagtttagaagtgaggatttggggtctgaataaggaagtaactcaggcacgcaggtgtccagagaggagctgggtgtcctgtccaaactacggggtcattgcaatctcagcctgaggatataagtctctatttttcataattatggcattgtcttcttaagaatagagcatatatacacatatatagtcatggggctagagagatgactcctccacggttaggagcacttactgctcttccatagtttacttctcagcacttttatgtcacacattttcaaaaccaccgttaataccagctccagaggatctgacaccctcttttagccccaatgggtactgtactcatgcacaaaaagataaaataaattttcttttaaagatttgcctggcatggtgatgcaccctttaaactctcagcactcagaagtagaggcaggaggatctctgtgagtttaaggccagtctggtctacagagtgagttccaggacagcctggggaatatagtgagaccctgtctcaaaaaaaaattttaaaaaaatatgtagttctagctgttttagattataagcaaattcaaaagtgattcaaatgggattattttaatttcctcatctttatcaacttatggaaaacaatgagattagctttttttttttttttttttttttaagcaagtgacaatgactggagagctgccccagcagtttggagtacctcttgcagaggacctgggttaaattaccaccacccatgtaggggattacaacatccactaactctagttctagggtatcccctggcctcttctcactgctgaggagccaagcacatgcaggcaaaacactcataaatgttaaataaataacaaataaatacaaaaactttttttaaaaagtgacaaaaactctcagaattgtttactagggaaatgggatcgtctggctaacttatctaaaacttagggataaatccaatcatgcacacagcggcttaagaccccaaagcaggaccttttattgaagcttttatttaaagtgatgtgccatgtgcacattaagtgacaacttaactaaagaggaagacagaactcaatccaagaccagaatgcggtggtagcttattaactaatatttattgatctcaaaatggctcacctgatatccaaacattcctagaacaaactaaatcagcatttggaatcagaaaaatctgacacaaactggaagatggtaacaagtcatgtaatctcttctaagtctcagtttccccatctgtgaaagaggataatagtgctcaccctttgatggcagtgtgaggttaaatgagataatatataaaaggatctacatattgtcgctggtggatctggggtctgagtaaacattggattcttgctctcttcctcttcctgagctaagatgtttttaggtgagttcatttatagacagcagttttagcaaaacactgattccctagggagaatcagtgttctagcataaaaacactcaaagaacatcaaaagggaaaataaccaataccttaaataatcatgggcacactctgaaaccttctaaatcattccttccatgctcatggataatgtagaactaagaaaattcccagggtatgggattatagctcttttaagtttgtatgtgacttccagaagaatcttcagggagcatcaactctctcgttttaaattctccataatgtatctgagctaagctctgaaaatttgtcaggaaggtgtctgagtgattagacagctaaggagggggcaggaggttaattgaaggtgttggcaagatgcccaaggctgcctaccaacaaagtgagctctttggcaccctcaacatagcatcgcatatacacacaggacacactatagtctggatatttccaccttagtgtgcattttttggagctgaaatcatctttaaaaaaataacaggtgaaattgtagctcaactttaaaaaaaatacagaaccatatgtcaccttgaaagtcagccaaaattcctgtgtcagcatgaagcttcccagagctttatcgaaaagaatccaactaaagcatttgaaatccacaaacaacctgatctcggattgttcactgatggcaggaaaaagctagatttacaggacaaggccccaaagtcctcacttctctccatcctcttttctcctcctagggcttcccccaacacatttgtctgcgtctgtttcctccataaaaggtgatcagccaatgcatgtagcagaaatctcagtgtgacttcgatgacccagagcccgagctgaggtccttgtccagagtgaagtgggaagtgggtgcctatagggccagaggcaacatggcacagaagggaagtgctgttcggagttagatttgactctgaaccccagctccaacagttttctctgaagcaccatttgttaaccatgaaacataggacaaatgtaggaacctccgtgaacatctcctccctcatggtaaattcttcccatcatacaaaatattgtatataaacacaagtactgtgctttgcccaaaaaaaggcagtaaatcatagttgctctcctcccagactctcttggagctagaccacaactcctagtattccaaactcccatccttttctctgcccaaaagatagcaccctccttttggagtttggttatctcttgtcctggttaacattcagtgtgtttctcgttactcagtgcacagatgcttcttgacacatttgccaagggtggaacaccttctctcagtgctagtggccctgcatgtgaaatcctggtgtgccctttcatactctctgtgttctagggactgcttctgccattggctctttgaaggcaggaactgtcattttcagatttatatccacattcttaatatcagacctggtaaacactgggtactcagtgaacaacacgagacaaggaagatccaagaagtaaatggcaccatcccattctcaggacacagcttggttttgcctattagataccaaagaatcatacatggaagggttgctcagaccactcctgtacctttgttttagttcatgttctatggctatgaagatacactgtggacaaggcaaatcttatttttaaaaaaagcacttaaattggggccttgctttcaatttcacaggcttagtttatctattttcatcatggtgacatgcaggtaggtgtggtgctggagaaggagctaagagatttacaagcagatcctctgacaacagacacagagagaaaaacactgggccaagtgtggccttttgaaatttcaaagcccacccttagtgacacacctcctccaacaagaccacacctcctaatccttccctgaaagctcatcaactgtggactaagcacgcaaatatatgagtctatgagggctgttttcattcaaaccaccacagccttgaagatagattaggcattaatggcatagccattatcaacctctcctaaaatgatctcaacctcaaaacccatatgttgaagtcctgattccctttatgaaagaatgtgaaaaaggaaaatcactcccaagtggggttattaaaatagacattagctgggtggtggtggcgcacacctttaatcccagctctcgggaggcagaggcaagcggatctttgtgagttcgaggccagcctagtctacagagccagttccaggacaggccccaaaacaaaacaaagaaacacagtctcaaaaaaccaaaataaataaataaatagatagatagataaataaataaatagaatagacattaatctaatgtggcctatgtcctttaaaacaaaaacaaaacacagaagaactgtgcatggtggctcatgcctgtaatcacagatctcagaaggctgaaggggaaggactgaggcgagtttgaggccagcctgaactatacagtagcatcttgtttaataagcaaaataaggaagagggctggataagggcatgaatagaggaaagccagtatggagaaaagagagaaagggccacccagcagacaggattggaactcatcctttctctcctagtttgtttctctatccctttgatgaacaccatgaccaaaaggaatttggtgggggtcagggaggggttgtttcagcttacagattaaagtccaccatcaaaagaagccaaggccagaagtcaagacagaagcttgaaccattagccccaagggcaatgctgcttactgtcttgatcccaggctcatggcttttcttgtccagtccaggcccactttcccaggaatggcaatgcccacagtagacagggctctcttacataattagcagtcaagaaaatgccccatagacatggccagaggccaatttgatggtggtagtacttcctagatgtgttaagttggcaataaatactagcaatcacacttcccttagctcccagaaggaaccaaccttgattttgtctccaaagtcatgagaacacgtttctactatttaaatcaactgttttctggcatttcatgaaaactgtccaggaaaacaaatccgccatctatctacggtgcagtcagacctatgagcctgtgctcacacctggccaagcagccagtccccctgccttggaagatgtctgccagtctccttagggagccacttctctgccttcagctttgtctcaattgtgaagtgtctctgcataaaaatgtttatacatatggattcaatgttgtctctttgagaaggtagtaattgttcacaggatttttaagtattcctatatattttaaatgttgctgtatttagtgtgtcttgtgaacgtcaataagaaataacatttacagaaaaagaacagcagattccttgttttgagtttcaatttgagcaaagctgaagaaaatgccaaaataatatgcaaatattaatccaccatatgtagggcttcttgcaattttttttttcctctggagctgtcaacacgattctgtgtctcttgttattcctgggtgtttattttatgtggttttttttatttgaatctgttctgtattcatgtattgggaattttcccacttgatcgtaccctctcatgatttctcttatttgaatctgttctgtatttcatatagtgggaattttcccagttgatcgtatcttctcactatgatttctttgtttgcaggaaattttgactgggtagggaacgactttacccagaatgctggcacgggccttgtcatcaaccaggcagatgtgagagacaacgggagcatcattaagcaacttaaagatgtgtttgaaagagactggtattcaccttatgccaaatccttacaaccaaccaaacagccaaactgctcaaacctgtccaaactcaagcctccctccaaccaacctgccacttataacaccaccaggagggagcccctgagtgcatagctcacttgacagacaagcaatgcaggaaggactagaggaaagacaacaatttactacgtcttttttttttttaaggagaaataaaaagcacacttattaaaaatgttctctgaatgacatgtaatatctagctaataacatcttagcaccatatattaaatttaagccttttgtatctatgagctctaacagagaatgtcattctggcgtaggagttagtttttaacatctgcatacagattttaagactctgttcttagctcctgtttcttactggttttagaaccttttctgctggcccagctgtacgggttttagagtgaggtgagccctatcctttaatactgctgaatcctggagttagaggaaggtagaagaagaaaaagacagacccaagtttctgccctaataaaccatctctaagacctatccaggcagctgagcacagacaccctcatctcatgccagtctccaagactcatgaaaaacacccatttttgttcccttgtcttctgatgccacaggttctctttggcatgggtctgtctttttctacagcaaccctgtagtcacctcaacactagctcaaaatgtgagaatatctttgggaaaggtatgaattccccagaatgtatacaaaatagaaatagcagtcttccattttcacctttcaactacatttttcttctctcccaacctggttattttaaaaaaccacaatcagatatctcatatatatatgatatatatgatatatatatatatatatatatatatatatatatatatatatactttcctcaagcttagaaaaatgaagtgcccctgctaatattcaccaaatcattaagtctgcatttagagaacaaagctatttcacatttgtgtctggttaacagtattataaaggaaaggtctctatgcgtcggtggattttaatttatttagaattattatgctgttaagagtatgccagcaaatgtttatagagctatttaatataccttctgctatttaatataccaaatgcttttcagacaaatgcaatttaaatactgtgcttaacatattttactaagaaacagaaatattggattattgttctataatgtcattgtgtgttgttttatatatctacaatacataatcctgtattaatggagactgttgctacatgagagaggtgtgacctcttcagagcccagagcaagtggccaagatgcccaggcccactctggctcccgccaccaagctcagaacagagtccttcgctctttggcctcgggtttctatagttaacatagagacaataatactcacctacctcgaaaggatgctgtcatggtaggcgatgtttataagctgttttttgaaatcaaaagaacctatataaatgctaagcattacactgcataatctttttcttgaaataatctctcagtatcctgatagaaccagtaccaagtactccccaagaatctagagggggaaattttctatctgcaaacacagatgacaaggaaaggggtgaagagtgggggttgctcctggtgacaatctggattgtggacatttgaatggaacatgatacctggtcaccgtgacataaataataacacacagagatgctgtgcaaatggaccttaacgaccagtgtgtacatgtgtctttagagcaaggataaataatctcatttgtttactttcatctccagagatttggttttaattatgccaaaaagagttccttacccaggctcactgaatgcagaatgttcccagtcctactgatcaccccagttccttcctgttatttctgtctcttgcctcactgggtgtttaaacaagtcaagagatctggaggagtctgcggccatggtggtacacacctttaataccagctcttgggaggcagaggcaggaagatctttggaggacagctggggttatagagagagaccctgcctcaaaatctaaacaacaacaacaacaaaaagaacagtgaaaaagacacagagagagagagagacacagagacagggagaaacagaaatgcagaaagagacagagacagggagaaacaaaaacagacagagagaaacacagagacagggagaaacagaaacaaacagaaacacagagagagatggagagcatgtgaggagacagccgtgctttaagagtatcaggttttatggactgattggaagactctcaggatgtctgttatacaccagcctcagtggagccctgcctgacccagtaacccatggctcagtgccaccacagctaagcacctcaccccaccatgcagcaccaaggaaagccagtcctgtgcatagagtcccatgttgtctgtcttctgagagaacattcagttcaggaggctgttctctttcactggggtactctcccacagaggggaccttttcctcttagacttctctgctggatagataactagcttccattcttcccattcctagtagttaggatgtatttctcaagagggaaagaacataaaacagaaacaaaaaccccaaggctacttataatgtagggctataccctgctggaaaatatgaagagggtgactactgtcctacactttttttttccatgaatattctgggacctgttctccaagggaatgaagaccaaacacaatttgagatacgttttggattgctccattaccaactaacttagtgccttatttattctcaacattggcttttcaaagctcaacagtgacccaccacacaggccacttctgaagtccagtacggcctcagggagattcactggttgaaagcaggcacgtgggatccacagtttctatgcatcgtactgttttcctaagacacataagacatttcacccttgtaccagtcactgtcacacgttctcctatgcctgccctgatagctttcgctgcattgtcaccagccattcacatattaaatcatggaactagcagaccacatgaaaggaagtggaatatggaggttgtatcttcactctcaaaaatcacactttgtggacctggaagtgacaagactcagacacactgtgaacacaagcatacacacgtgcgcgtttcccctgcacactgtctttaaggagcgtgtaagagacgttgccaaggttctgcaaaacatcacgtgaaaatgaatgtcttgagtttcgcaggctcagcaagagaaatgaaagatgtgtggaatcttctgctttttgtgttgctccgggcgctgtttcccaggaatctgctctgctttatctcagagccggcaccattctccatcagatgtgttggatcccattctattgattgatcttacgctttgaaaaaggtgttttcttaatatgtggttactagcttgttggaagtacctcactgaacctgggagggcagaagcttgttctctgtcccatccctgtcccccgtccccccccccagccctcacaccctcccccacgccacctgcagctcttctcaaatgacttggattcattcattctcagatttttgtttgcttacagaaacttttatggaactaagtttggggcgggagtggggagaggggatgtgagaatttcttggtaggatcagatccagtaccctctgtctcaggaattctatcttttttaaaatctgcatccccccctcccaaacacatgccctttgtaagggtttctccgtccgaattctattcccattatttttagaatgcaatgtgaaaatctgccctccccacatagagcagtcaattcctgttttgaaagacactttgctgtgatgattccaattctgtccttatcagcagtcctgtgtgggtgtgggtggattttcccttgccctggcttactcccaatgaacggtgcactctattataagcattttgactgagaatatagattggataaattactccgtatcccatgctttccagtttggtgcactctattataagcattttgactgagaatatagattggataaattactccgtatcccatgctttccagtttgctatggattcacacccttctttgtccacttgtgtcttgttaaccaaaagctgcctatcatcttctgcattaatgacataagtgaggccaccctccacccttagcctacattttccattggagagaattcccatctttggatgaactaggatacatttttttatggtagctatatgggtactctagagaagtttcttgaaactgtgaaaattgtgtcttcttatttgtgacctaccagcagtcttgtactcactgagctgtaaatgtccacaggccactcaggcttctgttggaaatcttacaaagggaaatgtggtattaagctgtgtgagtcgctacatacctgcaattccagtacttagcaggtcgaagcaggaggggcaggaattctacatcagttttatccatatagcaactttaaaaccagcctgggttatatgagaccctgtcttacaaaatggctgtgggtgaagacacatgccaccaaacctgagagccggagtcaatccccaggacctgaggggtgtaaagagaaaagctgactcagcaagctatactctatacacaaatgtcctttggcacaaacgcttgtgtgtgggtatacatacaacatatacacgaacacgtatgcactaaatgagtaagtactaaacatttaaaagaaataaacacagaaaagataagaaatgtaagatttaataagttgtcatgtattttcttttgttatgtgcaactactgacttaatcctgatacaaaggaaatttctatttttaatatacccttatgtaaacaggatagacatatatctgggcatatcaatcttcagaaaactaaataaattggttaataaaaggctgaatgggagggtgctttatagtgatcaattctttcttgtaaccaaatgccaaggttttccttttcaagcataattattataaaactttgtcatactgtgaagccagtggtttcttttttcctcagcttgatctgagaaaccaggtactgccataagcagtgactaagggagctaaagtggtccccgaaaacatgaagcattgtggagtttttcacccaaaaggcatctttgaaactagtcctatctgacaatttttaaaaggtttgctcccatatgaagaacataagaaaacactgtttagtgaagaaatatctgcataggccatgtcctggactacatccagtccagctgccttgttacccatcaccccccacccctcagatttatgtggaaaacctatagtaaatgtacccatgtcttctctgcaaactccctttggttggggttctgtttacaatgctgagaagcaaagccagggacttggggacattaagcgagagccctgccaccgaactacaccccagccccactgaacctcatttggtgtctgaagtttagaacttactttgaaagatgcctcaaccaatgcccactgatgcagaaaccccctcccaatttaggctgaggaagctcttcccttcaaacaagctgaagcccttagcaccaagccttgctaagaacatatgtgggatgaatggttgatctgcttttgccatgtgaactttcagtaggacttccctctgaaggaataaatgtacacatgtgcgcataagatgtccccccacccccgcccataaggagaagtctgaggcacacttttgtcaaagctgtcgcttgagttgccagcagagacttagtaaattggatttctcaatcttcaagtcagtaattttttttttttttttgatcagtaatgcctggatcctataacttcatggtttttaaaaaattgaagtaatatagttttataggaaccatttgcaaggggtgcaattaaatcatagcaagataaagactacttataattgatttttccccctttgatagaaacattagtaaaggtggtgttctcattttgtgaaaggagtgactaactctcacttccagtcctctgggcttcaggcctattgaaaacttaactcaataatcaactctaccccttcccatgggtagaaaacccttaggaacagcgaaaacgctgagcagacagacctggtttctaatttataatgttcctgtatgggttcttgggagcaatgacctcaatttccaggattaaaaatattgaaattgcacgtgacttaaataaagacatgaaataaagacggacatctttaaggacaactcagaatgtccgattcaatgacacctatgctaataatggtttcatctgcaattctaccttctttttttcactaaaagcagggattatttcttcaagtgtgtgtatgacagccatcatctaagacacgtatcagcagaagggtgacaccaaatcttcagaacagttgttgtagcagtgatagggcaagcactgggaaacaaaggcgttttgttcccagcaataaagctttctgctattacctacactcttagtaatacaggctttaagtttgctcgagagatcaggcaggcctccatgtcacacctcacgttccctgccatgtgagctcccacactggccacagctgctcaccttacttccaatgactggttgacggatagaccatggggaagccagagaaaagacgacacacccagaaacgcctggtttaaccgtcaagagtatgagagatagaaagtaagcaagcagaaagatgcggccggggcaggtggtgccaccttcaggcaggaaggataactgcacccacagggaccgccagagaccttgctgagtcaactttgcaggcactgggttgttttcctatcttccttattttcttatgtattggcataaataaattcatattaaccggcataacttgactctgtgtttattctttttttgttttgttttgtttgttttttgagacagggtttctctgtgtagttttggagcctatcctggcactcgttcttgcagaccaggctggtctcgaactcacagagatccgcctgcctctgcctcctgagtgctgggattaaaggagtgagccaccaacgtcccgctgactctgtgtttattcttgtgatccagaggatcccaactaacagggaatgtagtgaaaactgtcctttcttgatttctgttttttccctgtgttgttgttgtttgttgtttccgggggcggggtttattggttgggatgggaggagctagcctggtgctcactgtgaaacacaggctgatctcaaacccagggcactcccgcctcagcctcccaagtgtgggaattagagtcctgtcccacttgcccaggtttgtcctcctaaatggccttagagtagagaaggtgaaagaattaacactggagagatgtttcagagtttaagagcagtggctgctctttcagacgatccaggttcaattcccagcacccatatgggttcaattcccagcacccacacggtaactcacaactgtctgtaactctaatgtaccatgaattctctacctcagacagaagggtcaatcctgccctcagactgcttcagactgccttcctagactgccacaagctcctgttccctcccacctcatattcctgtccagctatatcctttcctatctatctccttctccttagtgctggcatttaaggcgtgtcactccaagtgttggaatcacctttgtatgacctctgtttctcttctagactgatcaaggtcgtgtagcccaggatagccttgaactaacagagatccgtctgcctctgtctcccgagtgctgttattaaaggtgtgagccaccactgcctgtcctctatggctaactagcattgctagctttacactctgatcttcaggcaagcttttccaggggatctgacaccttgtattaatacacataaaatacaattaaataaattatttttaattaacattgaagtgtgaactgttggtcatgtgttcatgtttagttatttttgtggtgaaccaccctgatctattccctaagtattaaacactaaatcaacagtaacaaaggatcctgggtgcataaagatgagttagaagcacagaacacagaaatcatgcacacaggcaataactaactacatgtcaaaaattgttgggatggtacttgggaggcagaagcaggtagatatgtgtgagttcaaggcaatctgacttacatagtgagttctaggccagccagagtcacaaagtgaggcactgtcacaaaacaaacaaaaaggaatgaaaaaagaaactgttgagatggaagagaaattggaagtctggaacctgtcaacccatacttttcttatgagggaaataaagcacaaaacacatactaagttcatggggttaagtagaggcaggtgtgtggcaaatttagataacgttctaaagtataaattctaattgaagggaccaccttcccttttggcagccataatggccgaacacatgcttctatgaccttgtcccagacactagaaagtcagatgcctgtctcgtgacaaggaaccaatcgaaagttagttagtcactagaaagtcagatgcctgcctcatgacaaggaaccaattgaaagttagttagtcactagaaagtcagatgcctgcctcgtgacaaggaaccaatcagaagttagctggtggcgctatgctttacaaccctgggtgtgctttacggacaagcgcacagcaatgatgtagagagcatagcaaccaccctgagagggcctatgggccataacaaccagttgaccaatcaacacagggcaagccctccaagcctggagtcacaccaatcctgagcctgtgcgtacccctagacactccccttacgctgccctataagatctctcgggagcccctaagagccgtcttttctagccatccgccatggcggatgggtgaaagacccgagctaacatggggttagctcgttcaattacaataaagcctcgtgcagtttgcagcaagctctcgaatccacctagtgattggggtgaccgcgaatgtggcctgggaccccggatacttgagttttcgggggtctaacactaatgactaaataaatacagaagatgttaataaaactcgaagtatttgatgtaagtaagtagtttacaggactttgtaggaggcagaagtagaagcaggactaagaaatctgacaaaggaaggtgagtttggagatgatttggaggggttggaggaagtcttggtgagaacatgtcacacggaagcctggctttgttccagctcagtttggctagagttggtaaagtcagaagtcctagagttaggttttgtccctctcaggtgtgagccatacttaaaagtgaaagaaggccataagctaccatcttagttattcttctatttctgggccaggatacaatgaccaaggcaacctataaaagaaagtatctaatttggggttcttggttccaaagggttagagcccatgaccatcatggcagtgagcaggcagccatggtgctggggcagtagcagtagctaagagcttacacctgatccacaagcccagggtagaaagagagagagctaactgggaatggcatggacttttgaaacctcaaagcctacccccattgacacaagaaagaggcaaagtggtcctgtaagacccacttgcccaagaacaagataacttcctggaatgccgggagctgtagttcttgggaaataacaagccacatgttttcactcccctaaataggtttgtttgacccatctgcaccagatgtgcttggtcacttgtgggagggaggtacacaggcaggaaatttgtcaggatgtatgctttcccttgattggacctgattggaaatgcaatgaattatgagttttgcctttttagcccatgtaaaatgtgagtcatggctattccctgggaatccaggggtggacctggccagagtccttcttcccagccagtatttacctaaggtttgcttcagatttggctcaaaactgtggaactggtctttgtcttaaatctcaggattaacacatatctcatccaacaagaccacacctcctagctcagcattggtggtgatgcctttaatcccagcactcgggaggcagaggcaggtggatctctgtgagttcgaggccagcctggtctccagagaaccaggataggctccaaagctacacagagaaaccctgtctcaaaaaaaaaaaaaaaaaagaccacacctcctaatccttcccaaatagttccaccacctggagactgaacattaaaacctatgagtctatggggacactctcattcaaactaccacagttaccatgtatcctcaatgaccagtgtgaaactggaaaggcttcagcacagaattaaagcttcctcaagaagaaatcccactgttggtcagcatccatccctacccaaggtccagcctgtctgtaagataggctgcccactggcttttgttctttctgagcatcccacacaatctcatacaccagtatgtacctacaaatcagtgtgtatgtgtgtgtggtgtatgtgtatatgtgtgatgatatgtgttgtgtgtgtggtatgtatggtgttgctttagttagggtttctattgctgcaacaaaacaccatgaccaaaaagcaagttggggaggaaagggtttatttggcttacacttccacattgctgttcctcactgaaggaagccaggacaggaactcacacagggcagtatcctagaggcaggagctgattcagaggccacagaggagtgccgcttactggcttgcttcttctggcttattcggcctgctttcttgttgaacccagaaccaccagcccagggatggtaccacccacaatgggctgggtcctcccccattgatcactaattgagaaaatgccttacagctggatctcatggagacatttcctcaagtgaggctccaccctctgaggactctagcttgtgtcaagttgacacacaaaattagccagtataggtgtgtatgtgtgtatatatatatatatatatatatatatatatatataaagagagagagagagttgtgtatgtgtgtgtagtgtgtgtgcatgtagtgcatgtgtgtgtggtgtatgtgatgtgtgtatagtatatgtgtgtaatgtgtgtgtagtgtgtgtatgtatagtgtatgtaatgtgtatgcagtatttgtgtgtatgtagtgtatgtgtattgtatgtgtgtaatatgtgtgtgcaatgtgtgtatctttgtggtttatgtgtatgtgcagtgtgtgtatgggtatgtgtgtagtgtttatgtgtgttcagtgtgtgtacatagtgtatgtatatgtgtgtgtactgtgtgtatgtgtgtgtgtgtgctgtgtgtgtgtgtgtgtgtgtgtgtgtattctattcctgtgtagaacactgatacagatggttggaagaaatctcaaaatcttaatcacctgaaaccataaaaggtatttttttctcatagtgaatattcactgtgaatcaacaagggttctctgtccatcggggtcaaaaaaagacccaattcagcaggaggcaagctgctggatgggcttatatatgcaaacaagttctctaaccaggaagtaacatgagtcacttctgctgaaaagacaaggatctcacccagactggtaccaggaaatgtcaccctactaagacttctaaatcgaggagaatctgtggcattcagtgaatactctgactcacactgttagttacaaaacacagacttcaatccttcagggcaaagtcatggggacagacagaaacaactgtttgtagtttctgtatgaggtttatttggtcttatgattccagaggttcaagactgaaggtctgcagcaggtgttgacctttttgcaggcagagttccaagacagcataggtgtcactgggtagaggcagcaatcatggatatgtgtttttaaccactgagccatctttccagccctcagtccaaataaatgttttcctgtatttgaatcctggtccctagttggtggctgtttgggaaggattagaaggtgtggccccagtggaggtggtatgtcactaggggtggtctggagctttcaaaagcctcccaccatcctgggtgtgttctctgcctcctgctgagctatgttcccagtcctctgttgagaaacttaaaagcaataatatgacttcagagggagttccaggagagccaggactgttacaaagagaaaccctgtcttgaaaaaacaaaaacaagaaggaacgagggagggagggaggagggagggagggagggagggagggagggagggagggagggagggagggagggagggagggagggaagaaaatctcacttccctaccatgttctaatcaatgcttttgtaaaacacaactgaaagtgggagaaaataaaattcagcacaacaaatgtttgcacacatcagggtatcctgaggatggcaagcttttgtgtttaggagtggagagggaggaagaggggaatcaagaacctgggctgctttttcagatgctgagcagagtttcacacacactcatcaggtgggaatgtggttctggaaatcactgactgagaacgggtcctgttaagcccctaaactaacagcaacacaggatgagtaggaagaaccagaaacagacaagccctagagagagttcccggtgctcagctctggctgagttaagatgacgatttgtgtccttgctgctgctcagtcatgtgtcggcagcaaacaaatattccctctgaagaaatgtaaacagtcagaactattttttcttcttcctgtttttttgtttgtttgttttatttttagtatacaatgtttgatactcaatgaaaagtttctaggcatccaaggaaggaaaacaatgtgccaaaatgtaagggatgtggtaaatagaaatcatagtattctagacaatgagaatctacacacgggcttcccaatgattctgtttaatgcgttggaggaactaaaagacaacagaattttagtagaatgtgaggggagggaggaaggaaacagcaaggaaggaaggaaggaaggaaggaaagaaggaaggaaggaaggaaggaaggaaggtccaacttatgttatggtctgaatcttcaatgtcccccactggctcacatctcaggtgcttgtctggaactttcaggaggtggagccagtctgggcaaaataagtcacaggggtgggttctggagattataacgtgccatcatttctgcccagctctctgcttcctgatcagccaccatgtgaccagtcagccactgctccacactcctgctgccacaacgaggagcagaggagtggctctactctgtcttctctgctatgatggactgtaatcctctgaaagcatgggctaaaagtcaattgtccttcctgtaagtagctcctattgggtattttgtgacagtgacacaaaaataactaacacactctggcaattaaattttggacttacaatgtagaaactaagagcaaaatctcaacaacaataaacagcgaaaatgcctgatagcatcaaagaatcaactgtagaaatgatggctgataagagactaaggcaggtggaccgtttgagattagcctggactacatagtaagactatgcctcaaaaagaaaaaaaaaaaaggtatggttaagtttgcaacaaaataaatccagtagattggtgagggaaagaaagaacagatccaaattattttaattacttaaaatcattaagggtaaagaaggaaaacagaaacaaaactattagctgttgggctagagaagaagctgaggggcaagtgcttgggtagaaggccccgaattccatcactagcatagcagaaaagaaaaacaaaacaaaagcctgaacacaccagcacataccaacacacacacacacacacacagacacacacacacacacacacacacacagacacacacacacacacacacacacacacacacacacacacacacacacgggtcgggggtggccacgggggcccacacacatagctttaaccccagcagtcgtgaggcagatagatctctgagtctgaggccatgctggtccacatagagttcaaggacagccagggctaaaaaaagagactgtatctcaagggttttcatgtggaaggcacattgtggtggtgtgaatgtaattgagcaccacaaacttataaagagtggcactattaggaggtgtggcttcatcggagtacgtgtggccttgttggaggaagtgtgtcactgtggggcttggtgagttttgaggcctcatacatgctcaagccacacccagtgtcactgaccacttcctgttgcctgtggtatcaaaatgtagctccttctccacacacagtacctactagagaggctgatgtcaatctgggcaacatggagatgaaaggtccgctcggaatgcttctgcatgtcccctgcccgctgcctctctgtcttccccgcctgtgccggtgctgggtgttctctctggagcaggcgggatgggctgggaaggatgggggcgggaggagagttggcctaggaggaaacggggcgctgcgctcatgctgggcaggggacatcacccgggctcacgccctgggccacccggcccccggcttctggggcgaagtaacccggccgatcgtccctgtgcgcagctgagccagaagggccgcccagggtagggtaggagtccggagcagttgaccgagggcagcgtggcggggactgagcagggcagggccagggtgcggccaggggctggagagtgcagcgcgggcggcgcctggaaggggaacttgagctgggagaggcagagcagcggtgctgcttgtccaggagctgcgagcggggagccgcctccaaggccaaggacacgggggccgcggagctgccggggcgctcccgccgccctgcttcccctcatcccgctgtccctgctgcagctgcgattgcagatgtttgggggcaccccttgaaagacccccgccggcctccacttcccccgccggccgcacgcccggccaccggctccctcccaagccttcaccccggcggggctcgcgcccccagcccgccccgcctggcacggcgctcccgcctgatgggaacgttccatcccaaggtcagccatctggacgccgagggaggaactgccgagtctgttgtacccaagatgagatagagccaaggcccttcgcctaattatcaaaccttgagaaaatgctctgtacctcattaaattgtccaatagaatccctgtaactatgcttttcgcttctgcactgtgctttttgctatataaggacctctctcccttggctcggggcacttggcctaacagaagctaagccgccccgggtgcccgcgtctctaataaagcctcttgctttttgcatccaagttcgtgttctcgctgattcctgggtgcgggtctccttctacgaaagtacctcttcgggggtctttcagagagatcctgtctctgaatatacaaaagtaaatggacccaaatggaagctcagaaaattaaaatacagtgaaatttaacagaaagtcttgatatatggatccacccaaataaaaccaaacaatataaatagatatttattatgtgttatatggagaaagagatgtaaaaagggaaaatttaaactcacatcatcaagggcattggtgcaggatgaaggtactgatttagcttagatttgaataaatctcttcccttgggttgggaaggtggctcagtcagtaaaagctgccaggtttgacaacttgaatccattccctgtacacacagtgggatgggagaactgactcccataagttgtcctctgacctccacatgtgtaccctgacatatgtgtgcatgcttgcacacacacacacacacacacacacacacacacaatataaatatataagtgtaaaagtgatgcatataataatacatgtagacattcaataaatagtaaaaggttaaatagccaataagattgtgagaagttggaaggcttaaaaataattcattctggggctagagagttttctctgtggttaacagcacctgctactactcttccaggggacctgagttccgtcccagcactcacatacagaggctcgcttgtaagtccagctccagggaattcaacatctcctatgacctccatgggcaactgtactcacacccacaaacccacacacagacgtacatgccccctatatacatatcatataaaaacaaaatacttaaaaataagtctttagaagctaagaagagggggagaaagaaggacagagtcatattgatagaaagcaacagtgagatggtagattaaaatcaaattgatctaaaatcacctttattttagacagaagaaatacccaccacacttaaaagatatgattttctaattggttttgttttatttgttcattttccaagacagactttttttcctctatgtcatcctagctgtcctagatagaactctcattgtcgaccaggatggtcttaaactcagacctctgcctcctgagtactgggttttgaaattacaagtacagacttttatgtcattttttaatggcagtctggagaattaagaactcttaacaacagcaggattggaatggcctgcttttaaagctgccttgttgggttccttaagttttattaactgtctttcctatttccatttcattgttgcttttctagttttagtgatagtgattttgacattttttatatcattcatgctcttgtttttacatggtaactgtatacattgaggatctatcagaagctttaaacaaatttggtcatatctatgtataagtatattctactgtaaatgtttaggtttctcaacttgcaacagttgttgatttcattgtgtagtaaacagtatacatgttaattttaaaagttataattaataaaaaaaaggtgtatgccaccatgcctggcttgatttgatttttattttttatagtattggtgctaaatcttcagtccttgaacttgttagtaaacacttgtggtcctaattccagtccttttgactggacttaaacagaatgcctaactttaagatttcctgtaacatgaggactcagagaagttgaaaataaacacaggggcatctttccctttgattttcctaagcatttgggagacatgttgaaatactacctagcccaattggactctggagagctagggctgaccattaacctaagagaaggactcagcctggaagatgtaacacctcaaaaccgtacaaggtgtgtgggtgagcagctgcaagaaataaaaaacccagcattatgaaaagaaaatggatgatgatgcccactcagcagaagtgggtgtgaaacaaagggtatgggggtgactcaaccaggcctcgggtcctacttcctggtggagttgtgagttcttgttttcattctagccatatttggttttaaacaaaatccatactgcggtccagtgagaagctgcagcaggggcacttgtcagcaagcttgacaacctgattccagcgccgggaacccacatggccaaaggaaagaagtggctcaggcaagttatcctgtgacctacacacacacacacacagagggggagggagaatgagagagagagagagagagagagagagagagagagagagagaggagagagagggagagagagagagagggagagagagagagaaagagagaggagagagagaggagagaagagagagagagagagagagagagagagagagagagagagagagagagagagagagagagagagagaatttctgagttctaccaggtaaaccttgaacctcagtgttcagttcctgagatcttcccagaaaatagtttctcaataaatgcgaacttcggggtagaagtctacagagagagttgaggtgtgtcttagtagagcactgactggcttaacatgacaaggtgtcagccaccgggcagtgtggtggacaatgtgagatctggcccctcactgcttaccatctgtgtactcactcccatgaccatccctgtattatttgctttcttcaatttccatgccatcttttctgttgacatcctgctcctgtgtccactgacacctgtttaccttgggttccaaacaccctctcctcttcctgccctccttccacattccttcaaccagagtttgagtctgtcccaccaggctccccaggtgctcaaaccacagccttcaccacaccgcttccctcaacacagcagtagtgggtggaaagctgccctgtttgtctctgccgacccaggattcaacactcatttgtggagctcataaaccaaacctgatcataagagtaacaacgactccagacttgtagcattaggaaatatttggagactggttctgctactcaggggctgtgtagggtgtgcgcatattaaccagctcacacctctccttcctcacccaaaataaaggcatcctgagagagccacttcagacttcatcatagcctggcttcaatctgtgcaccacacccaggggtcttgcagcaccacagcactcttgtaggataacagcctgcagctttcctgagaccacatgtccgtcctcctgacaagtggtttttcttaaatctcttccactatcattcatcaagaaactttctgattctgtggctggatagccacacatttgtggtcagctttacatgcttcttcttcggcagatattactattaccaagttatagactaaatgtttgtccttcacctcaggatcaatttgaatgtcgttttcacacacctgaaggcccaatatcagccctcacttctgtagccaatgctgcggcaagtctccttctatgcgtcattgaattgacacacactgagtctctggtgccatttgtcacctcagtctcagggccaagtgctggaaatatggtagcataatgacagaccctgtttgccttttgaggttaagagtcattctggatccttgcccagcagtagaagtttcttctgtttcttctgtccctttcacattctccttcgctcttctctccctgggaagtagagtggatagagcagggaacagaaaacgagagaggagaccactattttaacctttgccatctttgctatctgtgaccccatttcctaccaatgttgtccaactctaatacaattcaggaaaaccgagaattccaagcttcgtgggacacttaaattggatccagctggtcagaactcatttacaagtacctacaagtgtctccaattagacacttctcctgagtggtgagaggcagtgtctcctccggaaagaagtgacagaggaagtacgttgcctctgccccagactgtcctccatgacagtgcaaacatgcactgagtgtgaaggctggaaatgaaggtagagcatgctcagatatgcaaagtagacagaaacaggggccatgtgacatttgcaggaaaaatgatgcaactggaaagccttacatcaagcaaaataagctagatgcacaaagacaaacattgcatgtttgggcctggagagatggctggctttaagggaccctaccactcttgcagaggacagttcccagcacccacgtggtggcacacaaccatccataactcctgtgccaggggatctcatgccctcttctgccctctgcaggtaccagacatgcacatggtgtgtatacatatatgcaagctaaacacgtaaataaaatttttaaaaacatttaataccatatatgcatatatgagggatacttgaaggatgaaatggattcaaaacagggacaagagaagtaaaagtatatttttaaaaatataatgttatttcctagtttattatttggatttctcacactaaaatatatcacagaacaatttttcttgctgtctttatacatatgaagcattccattgtactaaacctttatataaatactgaagtggtatgcaagttttagtatgactttgagatgctgtactttttgctagatttggtcttctcaaaatgccacatttttacagtatgacagaccataacactatttttgtgtccgtgcaggaactgggccagtatccacacactttattttaataacctactatataatagttgttaaaatctattactggattgttcagatggaaaaattttagaaatgtgttgcaagaaaagcatttctattttcttcttggagaaggaactgcagactttctcatcacagtcatacttctataataaaagtagttgggtgtcaagaacctccctgtgacaaggactatggtatacaacttttcaaaggctgtatacagaaggtaaaacagcctcagttcccataggaggaaaacccacgaacattcaccatagctttaacacatgtgagtcccttcctgaccaataagaacccaacacaagtgtttctgttgggtcccttggctcttccctgagtccctgcaatcctccattcttacagcagagaaaaggagcctcactcgcagatgtgatggaaccaagatgaccgccaggccctcttaacccggaagttgaatctcagcatctatctgggaggaggggtgtgtttggtggacacttggacctctgtttcagcgagtgacagacatgactatgtagacactgtagctcaggaggcctggcctggattaggaagatgtctttcccacctggaacactacaacaaacaaataatgaaaaaggcactgaaactttttcctcgttgccctggccctggtcagagtccaggcagacatagtaaaaggagcaaagagacctctgcaactgcagcctgttccataagaacactgatcccatgagcttgagttacctgtaataacatgtccgataaatacaacttaagaaaggaagggcttccttgggctcacagctccagagagcagtcactggagaaaaatcatggcagcagaaacttgaagcagctggtagcattgcatcatccacacacagaaagcagagggtggtaaatgactatgctaagatcactttctcctcataagaaaatcattgtatgcaactctgccctaactcatgtggtctcccgagagctacagtatctagcagggaaagactggggaaggagacaccctccatatggctatgaaaaagctctcatgtctgctggcttaaaagtttttggtgtggtcctttgggtgaggagttcccacagccctgtaggtcacccctcacctatgctctgtaagaaagcccaataaacttaccacccccagaatgaactttaacggccttgtgccttagtttgtcatcagaactctaaggagaggggtagatgttactaatttctcccttgagaaggcttttagctgcatggggggcagcaaggtgtcaagagttaaaatatggaggagaacactagtagtcatgaggttagaaccctagtgaagcaaaagctaaatagtaccacaaaacagaaagaggcaccagggacttctccctccaccaccaccaccaccccccacttcacagaaagatgtttctgtgaaaacccgaagtcaacccatcagcggcctgattcatatgaccagcctccagaacacagagaaaaagatatttactttacttgaaccatctaatccatggtattttatatcagtccaaataaacagttaaagggaagagtttacttaaaaccacccttgcttccaataccaactgcaattttggggagttctcaaaccacactcaagcttagtaattcactagaaggattcccagaacttggtcaaagaacgtatctgtggtattgctgcaggggaatacaggaattaaaatcagcccaagaggaggcacactgggacctccagagttgagagaaatgcatgagactatcttgctaaaccatccatccattgtgtcatggccgaagcactcattcaccagtggaagaaaaaaaaacctgcattgagccactagtattgtgtgattctgacaagtgagaatggaagacacaaaggaaggagggactcttattttttctcacgcagctttgcattatttggctgattatcacaagtgtatacagatccctccccaacaaatcatttcaaaacaaaagtcccagaactgtaagacgctgatggaagacaaggaattgcccactatgcaatctgtgacttttagcttagcattctctgatgcctacaactcaaattatcattagctactgtcctggaagatttatgatctccactgctcaatgatgtgtagcaactgtttactcagagtgggtagaagacaaatgagagaagacagcctggttgtcatctatgacagatgtatgcaagaaatgacttttcctgtctgccacctatcctgccttgaggcttgctacataacataatgtgtacaaaagggcacatttacttcactgtaagtgcaccaagaagctgagtcttctatgtgtactgatattcaatgctgagagaataaacctaaaaatactacaacagtacattctggagcttcccaaagtattttctttacgataatacttcctaaagtattatctcagtggccctcatgacagtctatgtcatgtattcaatggcagacattattgccaaacattaaccttatcattttgtgtatcaagaccagaaatcgggactctgggaaatcccgccccggggtctgcaggcaaactgaatgagctgctttggcccctgccttgggcccaacttttgcctgcccactctgggaactcctgcccaggggtctgcagacaggtcgactcggcccctgaggaccaagcaacccagagtctgctgacatctctgcaccagtcctgctctcgcccatctggagagtgagtgcctcagacctgcctgcacccaccttgagacccaactgcacccacctgaagagaaccccagacccatacacaccaggaaaggaagtaacaccacctgcacccactggaagaagaaatgggaagatgacaatataagaacacatccaacaacaggaaaaccaatatgacaccaccagagtctagggactctataccagcaagacgtgaacatcccaacacagaagaagcagaagagagcaaccttaaaaacaacttcatgcagatggcaaagaccctaagagaggaaatcagaaaatccttcagagaaatggaagaaaagacgaaccaaatgatgcaagaaatcaaggaaagccaagaaaatacaattaaacagctgaaggaaacagttcaggacgtgaaaactgaaatagagacaataaagaaaacaaactgagggaatgctgcaagtggaaaaactgagcaaacaatcaggaaccacagatgcaagcataaccaatagaatacaagagatggaagacagaatctcagatgctgaagataaactagaggaaataaattcatcaagcaaagaaaatctgaagtccaacaaatccttaacacaaaatatccaggaaatttgggataccgtgaaaagaccaaacctaaggataataagtatagaagaaggtgaagaaacccaactcaaaggtgcagaaaacacattcaacaaaattaaagaagaaaactttcccaacctaaagaaagacatgccaatgaaagtacaagaagcctacagaacgccgaatagagtggaccacaaaagaaagtcccttcatcatgtaataattaaaacatcaaacatacagaataaagaaagaatattaagacagaaacttaacaaagagacaaaggaactaacagaagttatgacccaattgggattaacagacatctatagaactttccatccaaacacaaaagaatataccttcttttcagagtcgcatggaaccttctcaaaaatggaccacatactcagcaacatagcaaacctcaacaggtacaaaaaaaaaattggaataatccccctgagtcttatcagaccaccatgttttaaagttagaattcaaaaccaacacaaattgcagaaaacctaccaactcatggaaattgaacaacatgcaactgcaccattcctgggtcaaggaagaaagaaagaaagaaattaaagacttcctagaattcaatgaaaatattgacacaacatacccaagcttatgggacactttgaaagcagtactaagaggaaagttcatagctctaagtgctcacatgaagaaactagagaatactcacaccagagagttgacatcacagctgaaagctctagaacaaatagaagcaaattcacctgggaggagctgacaccaagaaataatcaaactgagggcagaaatcaataaagtcgcaacaaacaaaataattcaaagagttggttctttgaaaatcaacaagatagacaaacctttatccaaactaaccaaagggcagagagagaacaagcaaactaacaaaatcagaaatgaaaagggggacataacaacagacactgaggaaatccagagaatcttcaggccatactttgaaaacctgtactccacaaaatttgaaaattgaaaggaaatgaacaattttctggacagatatcacttaccaaaattgaattaagaccagataagcaacttaaacagacctataacctctaaggaaatagaagcagtcatcaaaagtctcccaaccaaaaaaagcccagggccagatggcttcagaattctaccagaaattcaaagaagagctaataccaatactcctcaaactgtcccacacaatagaagcagaaggttcgttgccaaactctttttacgaggctacaattaccttggtacccaagtcacacagacacaactaagaaagagaactatagaccaatatccctcatgaacatagatgcaaaaatactcaataaaatactggcaaaccaaatctaagaacatatcagaaaattcatccaccacgatcaaataggcttcattcctggaatgcagggttggttcaacattcgaaaatctatcaatgtaatccaccatataaaccaactgaagaagaaaaaccacatgatcatctcactaggtgctgaaaaagcctttgatccaacatcctttcatgataaagatcctggagagatcagaaatcacaggagcatagctacctgaacgtaataaaaacaatatacagtaagccaacagccaacatcaaactaagtggagagaaactcaaagctattcctccaaaatcaggaacaagacaaggctgtccactctctccatatctcttcaatattgtccttgaagttcttgatagagcaataagacaacaaaaggagatcaagggggatacaaattggaaaggaagaagtcaagctttcactgtttgcagataatatgatagtctacataagtgacccgaaaaactctaccagggaactcttacagctgataaacaccttcagtaaaatggcaggatacatgattaacccaaaaaatcagtagccctactatatatggataataaatatgctgagaaagaaatcagagaaacatcaccctttacaattgccacaaacaacataaaataccttgggataatgctagccaaaaaagtgaaagacctgtatcataagaagtttaagtcgggctggagagatggctcagaggttaaaagtgccgactgctcttccagaggtcctgagttcaattcccagcaaccacatggtggctcacaaccatcccttatgagatctggtgctctcttctggtgtgcagatatacatggaagcagaatgttgcatacataataaataaataaaatctttaaaaaaaaaaaagaagtttaagtctttaaagaaagaaattaaagaagataccaggaaatggaaggatctcccatgttcttggataggtaggatcaacatactaaaaatggcaatcttgccaaaagcaatctacagattcaatgcaatccccatcaaaatcccagcacaattcttcacagaacttgagaaacaattctcaactttatatggaaaaacaaaaggcccaggatagtcaaaacaaccctgtacaataaaagaacttccagaggcatcaccacccctaatttcaagctgtattatagagctataattttgaaaacagcttggtattggcacaaaaatagacaggtagaccaatggaatcgagttgaaaatcctgattttaacttgcacacctatgaatgcctgatatcagacaaagaagccaaagatatacaatggaataaagaaagcatcttcaataaagggtgctggcataactggatgctggcttgtagaagactgcagatagatccatgtctatcaccatgcacaaaacttaagtccaaatggatcaaagacctcaacataaacccagccacactcaacttattagatgagaaagtaagaaatacccatgaacaaattggtacaggagaccacttcctgaacataacaccactagcacagacactgagatccacaattaatacatgggacctcctgaaactgagaagcttctgtaaggcaaaggacacagtcaacaagacaaaaccacagcccatagattgggaaaagatcttcactaaccccacatctgacagagagctatctccaaaatatacaaagaactcaagaggctagtctccaaaacatcaagcaatccaattaaaaagtggggtacagaactaaatagacaattctcaatagaggaatctaaaatggttgaaaggcacataagaaagtgttcaacatccttagccatcagggacatacaaatcaaaacaactctgagataccatcttactcctgtcagaatggctaaaaccaaaaacaccaatgacagtttttgctggagaggatgtggagaaaggggaatagtcctccactgctggtggactttggaaatcagtatggctactcctcaagaaaataggaatcagtctaccacaagatccagcaattccactcttaggcatatacccaaaagaagcacattcccacaacaagggcatctgttcaactatgttcatagcagcactatttgtaatagccagaacctggaagcagtctagatgcccctcaactgaagaatgaatagaaaaaatgtggtacatttacacaatggagtactactcagtgggaaaaaaacaatggaatcttgaaatttgcaggaaaatggatggaattagaagaaaccattctgatcgaggtaacccaatcaaaaaagacaaatatggtatgtactcactcatatgcagatgttagacatagagtaaaggattaccagcctacaatccacactgccagagaagctagtaaacaaggaggaccctaggagagacatacatggtcccctggagaaggggaaagggtcaagatctcctgagcaaattgggagcacaggaagaggaggagggagctaggagaatgagaaggggagaagaggaggggtgaggaggtcatgatggggcagggaggttgagttgcaggaagaacagaagagagcaagataagagatcatataatagaggaagacattataagttcaaagagaaatcaggcactagggaaatgtctggagagctacaaagatgacaccaactaacaatctaagcaacagaggagaagcagctaccttaaatgccctctcctgataatgagattgatgactaattcatataccatcgcatagccctcatccagcagctggtggaagtagaagcagacacccacagctaaacactgaactgaactgaaatccagatgcagagaaggaggactgatgaacaaatgggtctagaccccctgaatgtggatgtcagtgaggagaccttggaaatctatgggacctcttgtagttgatcagtacttattgctaccataggaatgaactttaggagcccatcccacatggagggatactccctgagcctagacacaagggggttggcgtaggccctgttccaaagactatgacagactttgaaggcccccgtatggaaggcctcacccttcctggggagcagaaagggtatgggttgggtagggtgttagttgggggggcagggaggaaaggatggagagggatctgggattgacatgtaaaataattttcttcctaaaaaaaaaaaaaagaccagaaatccaggctggagagatggctcaggggttagagccttgcccgttcttccagagttcctgagttcaattcccagcaaccacagggtggctcacaaccatctgtaatgtagtcagagatacatgcaggcaaagcaatgtatacgtaacaaataaataattaaaaaaaataagagaccagaaatcaaggcctggagagatggctcagtggttaagaatgcttacggctcttctaaaggaccagagttcagtccccagtagccacatcaggtagctggcaactgcctgtaactgtgctccaggggattagatgtgcctggtctctgtgagcaccagcatatacccatgtgcatatacccaaacacacagacacatatacacacaaaaaatagaaaatgaagtcttttaaaagatcaggaattgccgggaaattaaataagagaaggaatgtgggcacgtttgttttttatagtgctatgcactttacttttgagtaaatcatgttaaaaaaacacttatgcatacaatcaaaatcgtcttctaatttgttttgctatgaaacgattcccttgtgtgaagtataattgctgttattattaagcatgcgctgtataccatgtactagtgctaatcttcatcggcaagacagagtttatcatctccaattaaaatataaaatgaggagctgggcacagtggcacacgcctttcatcccagcattaggcagccagaagcaggcggatgtctgtgagttcaaagtcagccaggtctacaaagtgagttccagggcatctcgagctaaatagtgagatcctgtctcaaaaaaacaatcaggacttggcagcacacatctttaatccctacactagggaggcaagtcaggcagatttccgtgagttccaggccagcctgatctacagagtgagttccaggacagccagggctgttatacagagaaaccctgtatcaaaaaagccaaaaccaataaaccaataaacaaacaaacaaagataaagcaaggttctgaatggctgttcacctttggccaatgttatactttttaatgctggtatgctagtcagctttctgccactataacaaagtacctaggatggtcaagtcataaagaaaaagcttcattttggctcacagttctgatccataaagagctagtcttattgccctgggtctaggccaagacagcatgacacgctgggagaaaaggcacttgaactccaaaccagggaccaatgagagtaaagaaggatccaccgaggctccacagttccttcaatgacacattcccaaggacttaaagacctgccattaggccctgacccttgaagctccctcctcccgatggcaccgcactggagacgaagcctttgacaaatgtcctttcaaaggtcattggaggtttaatttctaggccatgttttgtttctcatcctgaatccgcaagcccatctcacacaccctgtcatattccaccagaccatgtccactctgctgcctgagagtctgtcctttgaagaggctggccagggatgtctccttggccgtgtttccagaagctcccaccatactgacttctttctaactaacaaaacaggttcccagcatgggattgaaatcaagtcctgaggtcacccacattgatttctttctcatcaaatagccatccatcccacctactcattgcactttgggctgcatcaatattcgttatgttacttggagaaacaatttatgatgtcttgcctggtcactaacaaagacagatgaggtaaaggcgaattcatccggagggcagacaaacatgcaggttcactgggctgctgaccttggactctccactctgttgctgacaaatgatgataaaatgtttgtgtgatgcacctccagggttgggtgatccacagatcctggacttggccagaattatcaattttgctctggaaatcctatagcaaatgggaactgagaagaacccaaaatttctcttcatccttcccttcacaccctacctgctcatccacccctgtcccccataccccggaaaaaagaatccttaaagtggagacttcaagattactagatggggtgggggggcaggaggagacaagggggggctagagaaatggctcagtggaaaagagcactagctactcttccagaggtgtttagttcccaacacctacatggcaatttacaacctctgtagctccagttccagaggatccgacaccctcttctggcctgcttgggcactgcaggcatgtggtgcacagacacccatgcaggcaaaacacccatacacataaaatagaaacaaaatatttttaaatatggatcactagattgtttgtggatttcatacaggaaatttagaaaaccccaactctcaaacaaaaaagcagtgagatgaagtcatacaccactgttggtcaaaagccaagcaccacagtgtggctccagagggtcctatgaaattatcaagagcagtggcactgcagtcttggggcctcaaaaccagagctctgcgaccaggcagctgccctgttagaacagaggaacagaggaacacatgcacttgcaagccacccttgcggctctcacagctggcattgagcaaggccgtggctctgagtccaactccttttcgtaagtaaggaaaggggcctgcactgcccaagcaatgtgtttccataaaatgcaagtgaaaattcaagtgacacagttgtcccttgctatctgccagcaattggctcagggacctccttctgcatatgcccaagtcataaagtgccatggggtttacatatagccacagggctaacatatggctggtgcccatcctcccacacactggaaccacctctaaataattgacaggtcctaacatgagtaagtgttgtcaaatagctgctagtctgtgttacttaggactaacatgaaaagttgtccctttttagttgctgtgattttccccaaatattttcattttaaaaactgattgtgtgtgtgtgtgtgtgtgtgtgtgtgtgtgtgtgtgtgtgtgtacggtccatagcacaaatatgatggccaaccagggtttagttctctccttcctctgtatgggttccagggaccaaactcaggttgttggttgcagttacttttccctgatgagccatcttgccctcctctaatattttctatacacaattaactaactacacagacactaaacctacatgccaggtgtggggcccgggggggactgaatgcagtgcatttgaacgccttatataatcattatttttttttgttaaactaaagaaactacactcaccttagcatagaggtgggtctgaaagtcacttctcccaacagcaggaggccaaggccaatgacggtgagttcaaggcccactcccatcccaaaattaaaggagtcatattctctatacaaatggtggatgtgatttctacaattaagtgtgcttcaggccgatgtggctagagcatcttctaatgatgactctataaggcagtggttctcaacctttccaatgctgtgactctttaatacagctcctcacgctgtggtgaccaccaaccataaattatttcgttgttaactcataactgtaattttgctactattctgaatcataatgtaaaaatcccaaaggaatttccacccacaggttgagaagcactgctaggggaaagtccaggatatttagtctctttcaaaactatgcaacagtataagatgttattagtttactttaatttttaaactttaaggtacttattatttatatgtgcatgggggatgtgcacatgtgtgcaggcttccacagaaatcaaaaggtgttggatcccctggagctatgggcagttgtgcgccacccaacattttacagggacgggaacttaggtgtgagtggtccctactcttagccactgagccaactccagtcccaaaaacatgtattatattagaagctgggattagaatttctgtcagggagggagggagggagaaccattttttgcttcaggaaataactgagtcagcaacatggaggtagattgtgaagctgtgacatggggcagcaccagtcaacgacacactaaccctctgcaggtagagtctgagagccgggtctaacaggaaggggctgagccacagagacattggcaagagccgtgatttcagacgtgactgaaggatttctggagggaagctgttggtgtgctttcagatatttgtgggttaaatctccccactgcctcgggttttcagcaaatcatccacactcataaatgaatgtgccagggcctcataattcagggaaagtgggagctggaagccaggggtgaccttgagaatactagtctcttggaagcccatgggaatctttacacttttgaaagagactgtatcactgggtaagatagagatcttcactgacccctgagttactacatgctcctgtcccagctctggtcaacctctgctctgtggggaaaatgttgaaatccaaaagacaaagtgaggaaaacacagtcacatgtttatgtccttcctagtgtagtagcctacactacactacaagttggttgtcaacttgaccatatctgcaatgaactataatccagaaatggaaggcacacttgtgatatggatcttgaggcaagaagacaacatacctttagtccagaccttaaagttggaagacatacccctttaatccagacctggaaggctggaaggcaccccttctgctggaagcctatattagaacaatggatgaaggatttattctttgcctgtttcccctcactttgacagcacatccattcctctactggcattagagcctactccttcagggttgcagcacacacagaaaaccagctgagacacccagcctcctgggactgctgtattcttggattttccattcacaactagccattgttggactgaagcctgtaagtcattccagtaaattcatatgtatatgaatatacatatgaatttactcatacacatatgaatttttatatatatgtgaatttatgaatatatattaatctatatatagagagattcattccataagttctatgactctagagaaccctgactaataccctagggaaaagtggtttcaaaatgagcacaaaatagctatgctcttcctgatgcaaagtaagaatagtactacagccatgctggccccatgacccagtctcctgagtgctaggtttgcagatatgcacatcatgccaggctcccaacctcttcttactagtcccacctctagtatagactaattcttcataaagcatctgtctacctattatccatccatcatctatgtatgtatgtatgtatgtatctatctatctatctatctatctattcatccatctacctctatttatatctctatcacttcttggcaaccatcaggccacctcattggccatacactgtttaccatgagttgctgtctcatagttctaaaagtatggggcaaagtgactgtggattgaaaccttgagccaaaatagacttttcaacctttattgtctcactgagttttctcaccgtgatggaaagctatcattgctctcattatttcctggttttaaaaatccttataaatctttgttaacttgttagaaattgagtcttatttttaaattttgtgctcatattcttgttaatgaatctgcatgaattttcttgtctattaactgctttattccatcagccatgcataatctttccatatgcttagcatttatatggagccttaatatcttataaatatgcataagctctttatgtattaaggttattatcatttgtggtgatcacttacccagtctgtgatgtctctcctttcgatttggtttcttccaattaaaagtcatagaactgtattaaagtctcatgtttacaacaataacaattcaacaggtattttccactgccatgttgtgtgattatcaatagctcctcatgagtttggactttctgatatggagtcaaaatttgataaaccaagcccttaagatcaaagcagtctaatatggaatacagggctgagaatgtcactaggactctgaaagccatagcacagtgccacaacatatggaagggtcactgtaaagacagtggagagtgagctcagaggtccactgataggcagtaacccattagtgcatctgtgcactcctctctctctctctccccttcttcttcctgattagacaccatgtgaccagctgcccgagctcctagctaaatgtttctcatttctgaacctgacagtgagatgacaatctgaagcctaagtgaattaaaaacaaaacaaaaacccttgctttagaaatttcatttttagcaatcttatagatcttcctatcttactgcatttatttagagtgtgtgcctgtgtgtgtgtgtgtgtgtgtgtgtgtgtgtgtgtgttagcatgcatgggcactactgcatgcatagttcatgtcccatggtgcatttgtagatataaaaggacaactcctggaaattgattctctattctatcactagggtcccaaagattgaactcaaatcatcaggcttggtggcaagtgtctttacccactgagccatctggctggcccagatcatcttattttaaaaaagaacttttccttgataggcataatagcatatgattgtaaggccagtatgccatgtgggagctgagacaagatttcaagcttaaattgagctgtttaaaaagaatgtgtgagccaggtggtgttggtgcatgtttttaatccctgcacttgggaggtagaagcagcagatctctgagttcgaggccagcctggtctacagagcgagttccagaacagccagagctgttacatagaaaaaccaaaggggcagggcgggtggaatttatgtcagccgattggtgacctttaatcccagcaatagcaggcagatctctgtgagttcaaggccagacaggtctactgagcaagttccagtagagctacacagagaaaccctgtctcaaaaaagaaaaaaatagatctgtgttggaaacaggtatttgatgcatttttatacgagtcacgaatcactaaatcctctttattgatttgaaaagatccattgtactgtgacaatttcagtttatgtgttaaattcttatctaaagtgcaaggttgttatcatgtgctcaaattcaggcagatactataataatgagagactggactgtcctttaaatgaccagggttcactactagtatgataattaataatatttgttaatgtggcagaacctagagtcacctaggaaacaaactctggcatatctgtgaaggagttgcagactgtgtaactgaggtgaaaggcccaccctagcgtgcctggcacattccacgagctggtggtcctaatgaaagcaggctgagcaccgcattctgcttccccgctgtgcgtgccctataaccagctgtgttaagctcctaccaccatgatttcccgtcaccatggactgttcttcaaactgtaaaccaaactaaacccgcctttcttttagttgcttttgttgggtgttttgtcacacaagaaaaggaactaacacggctgaattcctgacagtcagtcacggaggtggctctgtgcctcacttgatttctatgagcactgggttgttttgtgaaacagaaaccctgactctcctcccagtggcaatgcaatgattaaatgatgtaacattagaggggcagacagcatttgcttactattagctcccattgcctctgcttggctgaagctagatgtgcacaccaacatgacaaggctgggtcagatgattccttccattttaattacaggctaacaccgaacaactggaaccagcacagacggccctcagtgaatgaggaggttacatcctgacagacctatatcatgagctggaactatggttaatacactaaagccacagaacactggcctagcatgtgtcccagtggagagtaggctgtttcatccccaggtcccacgtgatggaaggagaaaactaactgacccccacaagttcacagaaacaatgcagacattcacacacacacacatacacacacacacacacacacacacacacacacacacacacacacgtacacgcaagcatttttaaaaagatttatttatttatttatttatttatttatttatttattatgtatactatgttctgcctgcatgtatccctgcaggccagaagagggcaccagatatcattatagacagttgtgagcctccatgtagttgctggaaattgaactcgggacctctggaagaacagcctgtgtgcttaccctccaatctctccagcacccccacacacatttctattatttgcaataataaaaacaaatgcacagcacacatacagaaagaatctgatgagacgtggacaagattctccaggtgactgtagaagaatgaactgtgtgggctttgagtgaaaaatagtgaggtcactgggggagactcagccagaaagaaagcatctatacataggcttagggtccaaagccccttcagtagtggcccttcctaacacctacagtgacaaagtctttctaggtgaaatgcaaagcacatgagtgtgtgctgtctttagctttgttttggcagcaagccaatatcaacacagaggaaaccacgtggggtcttccctcacacagaagttcttagattgaggtccaaagagatttcagcagccacacggccgaggagatagactgaagggtccagaggtagcaggcggctagaggaggtgtgctgtcagcagcattgggtgatctagcagctgtccagggacacatgggccacctgcagcatgtctgccctccttaaagcaaggggacgtgggctatagtgtctggagagatggctcggcagacaagagcacttcttgtagaaggcctgcattgtaggtggacttttctgtctcgatagacaactccccaaataaccacactgaggcttattattaatcataggtaatcggctgatagatcaggcttctttcaacatggcacatttatcttgcttctctctgtgtctctccagacttcccagactctgcctgtaactccagccccaagagattaggcatccaaggatatggtgggttaaatgagaatagcccctaaaggttatatatttgaatgtttggatcccagttggtggaactgtttggggaggactaggaggtgtggctctgtgggaggaagtatgttactggggatgggctttgagacttcaaaagttcataccaggcccagtcttccactctgtgcaccgtgatggtagatcagatgtaactcttagctactgctaaagcacctgcctaatgttatgctttccgccatggtgaccatgaaactgtaagcaaattgtaagtacattagatgctttcttctataagttgccttggacatggtgtctctttgaagaaaaagaagagtaattaaagacagagggggcccggcattggtggcccaaacctttaatcccagcactcaggaggcagaggcaggctatctctgtgagttcgagatcagcctggtgtacaagagctagttccaggataggttccaaagccacagagaaaccctgtctggaaacccaccccccacccccgccgccaaaaaaaagacagagggaactcacacacacacatgcaaatagacacatacatataagtataaaaaaataaaacaatgtaaaaatttcatgataataccataagacattaattacatacgcctgtgtgtgtgtgtgtgtgtgtgtgtgtgtgtgtgtgtgttacctctgaggatgccattactgaaattgtgctgaattcatttcagaccaatcccctctttcacttcccctaattcccaagtacctagaaatgcaaaaaaaacagtgaagagcagagcagggcatggtggcactcacctgtaatctccggcactggggtagctaaggcaggagaatcaggagtgtgaagacttgaagatggcatgtatttcaaagaaataaagaaggaaggaaggaaggaaggaaggaaggaaggaaggaaggaaggaaggaaggaaggaagaaaaaaaggaaggaaggaaggaaggaaagcaatagataaggaagacatcacatgaccattacatcctcaattccaaagccaactactactgatttgagcctctgcctgtgcattctctccactttacagatgagtcattaagagtagaccttaacaggaaagaagagcctgaccaaagagctttgtctacttgtggccacagtaactaacccaagctcaggaacttactgttgagcatcaagtgtagtgtgacatctagtggtgaaaggtgctaatttcatgtccctctagagtttaatagaaacaaaaaaagcactgtgtgtcaactgccacactaagtgctgaggggaggagtcaatgatgacaatgtgctgtctgtgtttcctttggagtttgcggacctgatcgagggtggagagagcaggtctttagcttttcaactctgggcagacatcaacgtgtgtgctatctccacctcttagcaggtttttagccactgacagaaatgatagaggcctggactggagggagagagagattcagggtccgctgaccagcaagtgagtgtggagatgtgaatgtgggcaacacacgggaacacttagtgagtacaggatagttcagtatagatttcttactaataaaaactattcaattcaaaatcagcctagcagccaggcgttggtggcgcacgccttttatcccagcacttgggaggcagtggcaggtagatctctgtaagttccagaccagcctggtctacaagagctagttccaggacagcctccaaaaccacagagaaaccctgtctcgaaaaacaaccaaaaaaaaaaaaaaaaaaaaaaaaaaaaagtcagcccagcgtgtatttatagatatatgtctgtaattccagcatcaaggcgggagaataacaagtttgaggtggggctgggctgcatagtagaccttgtctccaaagaaagaaaagcaagccaaataacacaggtggccagatggttcagagcttgttaagaaagccagcaatcaacttggtacgccagactctgggaatccccaaggaaagccttacctactctgagggtggggtgggaagggagggaggcggagttcgggagaagggaaaggaggggtaactggggttggtatataaaatgaaaaataaattatttaaataaaaaagaaagccaggcaaactgaattcaattccaagaaacaacataaaaatggaggagagaaaaactccacaaagttgtcctctgacctccacacgaacggtgtggcacgcttgcccacacacataaacattacacatacacacagaaataacaattttttaaaatacgcactttattgtggctgaaaagtcagccaagactctaaattgagtgtttgggaaatgtctcgtattctcggagatgtttactaagtagtaatacaagaaacagaacctgacagaaaccatcaactaagataaataacatgggaaaaggatatgtgaaccacacagcactgcagccacagaaaatgtccacggcgggtgagagggtcgtgcacaaggaaaacacaaaatgcttgagctcgttcctagaaaagagttgcaactctcctatgctctgcagaggctgtgcaggaagaggggttggcttaatctttgccagtttgactgtagatagtagtgataaagatcccttgtgtgttgtgtggtgtggtgtgtgtgtgtgtgtgtgtgtgtgtgtgtgtgtgtgtgtgtgtgtatgcttgtggacaccagaggacaaccagaggtatctccttttttattctcctcctgattgattaatttattaattgatttttttgataagttcttaccatgaagccttggctcgcctggaagtcactatataggccagactggcactgaactcatagatccacctgccccttcttctgagctctgggactgaaggcatgtccacatgcctggcttcccccactcctttttttggcttttccagacagggtctctctgtgtagccctggctgtcatggaacatactttgtgggccaggctggcctcaaactcatagagatctgcctgcctctgctgggactaaaggtgtgtgccactgcctacgcccccccttatttttttaaagtctctcactgaatctggagcttgggacttttttgtttgttttttttttgcatttttttaacttactagactagctggccaggaagtcctacaccccttccctccccagcagtctctgtcccaccttacccccacacccagagcagaggttacatgtacacactgccatggcaggattttagttgcgcactgaggatctaaactcaagcactcatgcttatgtaacacatactttactactgtgtcctctcagccccgtgacgcagatttcttggtgaactttgctttatggtttgaggatgttgttttgttttcttttgatttgtgttactgctattactgttgtttaaaatggtatggtagtttggatgtaattggcccccctaagcttataaggagtggcaccgttaggaggtgtggccttattggagtaggcatggccttattgaaggaagtgtgtcactgtggaggtgggctttgaggtctcctatgctcaagctatgcccagggtagcacacagttcacttcctgttgcctgaggatcaagacgtagaactctcagctccagcaccatgtctgcctgcatgtctgaccacaatgctaatggactgaacccctgaactataagtcacccaattaaatgttttcctttgtaggagttgctgtggttgtggtgtctcttcacaacaacagaaaccctatctaagacagaagtggtctcctgtatctcaggctggtcatgaactcacgatgtggccagggattaccttgaattcataacccttctgccttcatccctcaggtgtcaggattacagccatgtatcaccatgttagaccctgatatgttctcatgagctgattcaaattaataaatccaatatgcaggacagcaaggggcaacaaagggtcggtgtccacggcaaagctatatttctctgtgctcacatgcagaagtaaatttagtagtcccaggtctaaggactgctatggtattttgttttcattgttggtaaatagtttctggcttcaaggtaattcaaatttctaattaagttattactcataaatagattattctagtagtttcacttgcaaaaagataaagcaggggctgaagaaatggctcaatagttcagagcacttgcggagggccaggcttcagttccctggacccatgcagtagctgacaactgtctgtaaacctagttccagacgcattgatgccctcttctgacctctcaggcatgaagcctggatgtggtgtacacacatacatgcaagcaaaacactcccacaaatagaacaagattaaataaaaatttttaaaatatgtaaagcaaaccaggtggcacacacttttaatcccagcactcgggaggcagaggcaggtggatctctgtgagttcgaggccagcctggtctacagagtgagttccaggacagactccaaagctaaacagagaaaccctgtctcaaacttaaaaaagaaaagaaaaaatatgtaaggtaaagctaagactttaaaaggatgaacttaatggtgagctggcagtccttgggagactgaaagtgcatcctcttccatggtgccaattgccctgtaaggctctccacctgcctgggatcactcccagctgtgttcttggcctgagcagcacctcagggcttgggaacaaacaggccagtggctgcacaaacatgacacaaaaagagaagaaatgccccctcctaccttccccaaaggaagggaggcagtgggtcacgtgcacatctgtatttatctttcacaattcccactaatgatagattgagagtaagtcaaatccaatcatattggctgagcccacaccatacactcaaagccaaaaatgaacatgtacctggaaacaccgtcactgcagaaactgtgctaggagaggagactatctctggaacatggttttattttattttattttttggtttttcgagacagggtttctctgtgactttggaagttgtcctggaactagctcttctagaacaggctggccttgaactcacagagatctgcctgtctctgcctccaaagtgccgggactaaaggcgtgtgccaccaacgcccggcctctggaacatggttaaggacagactgggagggaatatagcaagaacattccaggtgtggaaattaaacccacggccggaagaagtatgcagggatgggtatagtgggtcaggaaggacctgagctggagggttggttaaggagggtgaactatgggtgctgagattcaactgcgaaggatcctgactgggatctgtacttgaccttgggtatgaggagtcaaagttaggattttcgaaatgagatttgtcttccttcctctagccttcattttgctattccagggaagttttttttaatttattacattagttgatttatttatttgttcatgtatttatttgatttgtgaggggaggggttggcataccctggtgtgcctcaggaggtcagaagacaacttgcaggagtcagttctctccttccactttgtggatgctgggaattggactctggtcatcaagcttgggaaccaaagcctttattcactaagcaatctcaccagccctccaggagaaattctatataataacaaatagaaggcacatgtcttcctggtccctactgaatagacaggctatgtcttaaagatgagaatatctctgaatttctcatttcctttttatacttaacctctccttgtcccagagcttggagactcctgatgagtcatacgtggatgagtacaatatggggtaatatcaacaatgggaacaagggccttttccacctctcatgccttccctctctcttctcctcgttcctgagttctcttttattctccgcatcaatctgtacctaaatagagtgcttttccagcatgcacagaacctggggttttatctccagcgttcataaacctggcatgatagcacacacctgtaacctaactctccagaggaggaggcaagagaaacggacattcaagatcagcctggactgcgcaaagagtttgagaccagaaggagctatatgagactgtgctccccacacttttaaagacaaactttaagcaaataacaaacaactagtgaaactacagctattgccaacgtggcccatgagagttaagatacaggttaagaagccatgctcagttgcagtgtgtcttcagacctgtgcatgctaatccgtggtcatgtggaatgctcagtcttcaaagtcaacatggcagagtaggtcagcccaggcccggggcccttcttattctgtcttctctgcagttttcataaccttttgatggctgcaactcacttcagtggagaccctcagtccatatcctcccaagcccagccaccacctgaccttccactggcttcagtctccaaggcactccactctaaccgtagtcacggttatagatcccccatgtcagcttgactgtagcccagttttccagacagtggagcattgctcatgcagctgctggagccatatcagcccattaattatgagcacgtgactctccatctgctccaggctgatggcgttacccggcttcctccttatttccatcgtaactttccaaacgtgtcgaatattccaatccagatcgcaaccttcttgtgccaagcttccatcttttcttccctcgcccacttcagggctctgcctcctgtctacactacacattgctacatggatagattttttttttcaaggtacaaattcaatccattgtacttccactgggactttccagcggttgccacgcactcccccactgatcagctggtgggactcaccagcccttcagccacctttgtagcgggttctgctcctgcgtttggaactcttaaccacactgccccctggcgctgccttaaacacacagcgtccctctttgttcccaggctcttcccctccttcagttccacccctttcgtttctgccactgtgtcactgtcttgtttctgactatgtcctcagaagactttcttccacaatcctctacctgccccacacctagacctctcctcccgtgactggcgcagctgtgtgcctccttggccaactccgccttcccagtatactgcaggttctttgtcagaagccagagaccttgttcatttttattcctctatcatctccccagaatctctagggcatctaccacaagcaggcagccaagagcttagaagccagctgtgacagacagtacaggcatagaatcccagcacttgggaatggagcaggaaactactcctcccacccctacaaatgctaaaaatgggtttcctctagtacaccaggtacgttcccagtgtccttcagtgctatgtaggccctggatataacaggaaatgcccctccccccccttaggaaaacaggtttcattctccttttgcagctgctttcagaaagggccctttcagaatccgtttcccatcacatcagagttcttttctgtttgtgtcttaaggattagtaatccatggattgcttccagttgcctagatcatttttcacccagactggtagggccaacagctgcacagctgagtcaggaaagaggaaccaagctttccggctgtggacctggggtctgtgaagccagtccacagctcgtgtcctctggccccaaagactctgtaacgaggtcctcactcccagcctgtaaccaccgggccttaatctccaagggtgattaatgagagactagtgacttgggtctgggctgtggtgagtactaggggagccatcagacaccaagtccatcaggaccaaaagtcagggaagggaggtggtttctgtgcacagacaccgtaatcccagcactgctgagaatgctgcagttaagtgttttctcagtaacagtcgtcatggctccactctaggctagcattaaattccgcagtgcaaagccttgtctcatgaaggggtttggcagcatgtggtcatgggctcaagtctcaccatccccatgaggctgatcaaattactctctaagcttcaggtgccttttctccaccccaggggaactaaatgctaaaatgaattagccatcccagggcctaacctaaagctccctgaatgtcatcctgatgacttgcaaatgacaaaagagaaaacactggcaggggtgactactgagatggaggctgctgaaaggagtgctagtgaattaggcagcaaatggaaggaaacgcactgtggtttaaaagctaaagatcacatggatatggagtttctgagggttattgatgcttttcagaccagcatcaatgaaacactgaaagtgatgaatcacccaattaaaggcaaaataggaatcccagagccccacccccaccccccgataaaggagacactcatggtctataagtacagagcatacaaaaataaggatcaggccagaacctagctgtatgaacaacaaaacaccatgaaagttgacctctcaaacttcacgtttgctgtgccacggtcagggtcctctggctgggatgttctggaacttgacatcttcgatggatacatgtggtctaatagctctgaaaacttgaactccaatgtttgcttggaagatctactctgatctagagaagccctggtaaatctttcccctttacttaaaagcatgagaccttagaagacaacttgtatccctgcctagaagacacccaacacccatctctccttccggtcattctactaacaattaggttaggttaggacataagccttgtggtggtttgagagaaaatagcccccaaaggcagtggcgctattttgatagaactttcattttataaatacactgagttaaccaagatatcatgtatttcattgatttttatgacatgcaattcagaagtaaatacagtagaattattacttagatttaaaaaaaaaaaactcccagttttgaattttaaaacactgaaatagtgtatgaaggatagttgaataatgcctattttaaaacacaagtacattttattgtaaatcataaaattggatagaaacttgtgtttgtgaaaactgagcattaaaaagttgtgtttttttatcaaaacagaatagcaatggacacagtaaccattgtcgcctatagctccgagcctatgggtaaggggggtacagaatgtgcacagagacagctgactctgctcatgtgtatctagggactcaaccatgaagacacaaaggacttggtacaactcagaggactgacaacaggaaccatctggaggcatttcagactcaaacctgggcccagcaggactgaggctggaatgactccaaggggcctctcatagcacagtagctgaattgcacatcaaagcatccttcaaagcaacagctggagaacatgtgattccagaagccaaggcaggagctgaccagtctgtaggagacagattcagaccatttttaggctggatatagcctttcttttcttggcacccactcacataactggaactaatatgcaatgagttcactatggattatattcctttgcatctaggttgtttgtgattttcctgttaaatttatttttagctgagtaacttcctcattgtaagctgtgtgttttaaagctaattccacaattccctctgatataaagtcaattttctcacttaggtttttgtttttctttctttctttttccagacagggtttctttgcatagccctggccatcctggaacttgatctacagaccaggctggcctcgaacacagagatccgcctgcctctgcctcctgagagctgggattaaaggtgtgccaccccacccagcctcaactagattcttatcatctgatcttttcctttgtagcttctgaaattcatgtttctaagtgcactctcccagctcagatactataaaatgacggctaccctttctgtattctcacagccacacaggagtttttgagcaagcaggataaatttgggtaacagaagaggctgctcaggtcctgacattttcccaaatgcacaagcaattgtcaatgtgcacttactgactgctctctctctctctctctctctctctctctctctctctctctccccggacatctgaatttgctgagactgtgaatccatgtcagcaccacactaacaagaaaaccccttatgatcatggagcagaactcttttatggaatttatcatggcacccaagaaggttgagtacaacataggtagtaggccacctgatcggcccctgtttataaattagatgttgttggactgtcctcatgctcactgtttcttgtatgggatggcagggttgagtagctgcagtagagactgaaaaacttgcatgacataaaactctgacccttgaaggaaaacatttgttggtcccttctctacatttaccatgagagttctaataccaagatatccctggggaaggatgttctggaagttcagtggtagagtgcttatctaacacggataagacactaggtttcatttccctgaactccaggggggaaagccactcttggaagacaagagctttgtcaagtctgctgaacttactgatattgttccaaatggcttttcctggagcttatcagaggtatacatgaaaacctcctcatggatctaaaagcattcttagttgtgatcctgccatcacaaaatgtcctccaagcctcttcatccgtctttacccctaaaatatgtgtggaagaaaccagttgcccctgtatccaaaactgctttcaagtaagagctgggctcatagcagtcatatctggatccctaatctagggcagagattccaagtttttacataatagacacctgggcaaataattcttggtggtgaatcctttataacatcaatggactgtacttagctgagggcacacatgcttcaccactatagtgatacccaaactgtctcccaacattgtccagtgtactcttagtaaagaataagaagttaagtaactactgagaaacactggtacagagaccactcaagtttggtcagcaagccaacaccatcagcatcatctcagagcttgacaggatgtagaataccacagagtatttcttagaactacttcctaaacctccagtttctcaagatcctcagagggttcccgaagcctttagagttggcggctgccttgagaaagaactaccaggatgctttgtccctatccatcctgacccatctcgagttcaggtcacgtgtggagcacattatcttcggcatgctgtccaggcgggagagcagtggtttcggcatcagatggtcctgggtccaaaagaaaggtctgtgctgcaagtctaatagattatttaatctgtgttattttcttcgtatcaaaaaaaaaaaaactacattggcttcaaatcaggaagacctaagcaggctacacaagatttgcaccctccgattcaaggttaccaagtcacttgtctttccttcccaagtgatcaaacagatgtagccccccctctgccagctgcttcagaacccaagtctccacggatggctgtcagaactgaccaataccactagggggcggaagcgaccttctttaggttgaggagagccagattgtggccatataaacttcctcataaaggtcgtctttagccaagtggagtattacatgtaaatgttggaagcgggagttgctggctagttcaacttgacacaagctagaatcttcagagaaggagccttaactgagaaaatgtctacaaaaggattgggctgtgggcaaatctgtagggcattttcttatttagtgactgatggaggaggcagcccattgtgggtggggccatccattcatcccaggactggatgagcaagctgtgagaagcaagccggttagcagcactcctccatggcctctgcatcagctcctgcctccaggtccctgccctgacttccttcagtgatgaacagtgagtgatctggaagtgtatgccaaataaatccttcccccccaacttgcttttttggtcaccacatggggtttcgctacaacagtaaccctaacataggggctaaccagaaaagtaaatgcatctccttaggaactctagagggttctcggataaagaactgaagaaccgggtgtgcgtgccagctcctggtgctgctatggtaaccggcgctcaccgtgacgtcatccaaggggcgcttgctggcgaattaaagggcacaggctggggagtgagggtctaagactacaataagtcaagtaaaggccgagataaaatcagaggatgtctggccgctgaactaagctctatcccaaatgtagatatgattttatctttacaagatgcctttgcctaaagataagcagttatgaatatgaattcatcccggagcactgatgaagccctgtccgcagcaggctaagtcaggacgacccggaacttccagacctgggctacagagtgagttcaaggccacttggggcgccaccactgccctgccactttatcacattctctgatcaacaagccaggtgtggtagctcacacctttaatcccagcactgaggcaggggcaggcggatctgagttcaaggccagcttgtctagagtgagttccgggacagctagggctgtttacatagaccccgcctaaaaacaaattctctgcttaagcgtttttagacgtattaatgccattatgcgagatgtcaacattaaacttcgtaaaagtgaaatcgtaagagtattttactgtttttctgtttgattctgtaattgtccccaatatacagatgagcagaaagggagagttgtgtctccctggaaactagtggcatcttcactggaccttttccaccctggagctttctctgaaccccctccctctcacttctacatcccacttgggaagattgctttgttgtagatttttgttgtttttcgagacggggtttctctgtgtatctttggagcctatcctggcactcgctctgtagaccaggctggccttgaactcagagattcgcctgcctctgcctcccgagtgctgggactaaaggcatgcaccaccaatgcccggcttattgtagataattaatggcacagtgaacctgtcacttgacactgtgtaacttattacaaagttctagctcgttcctagacattccagtcacaggaattgcactgccatcccaggcaaggtgtttgctttaaaaatgagttggaccaaacccagggcctcatgtgtgctagacaaaaacttgactaagcagtatcctcagccttcaaagctaatttcaaacaagaagacgttctgggtgtggtggtgcacacttttaatcacagcactcaggaggcagaggcaggcagatctctgtaagctagggacagcctggtctacagagatttctaggctaacgagagctatgtagaccatgtctctgaaataagaaagtaatctcagcatgacacacccacttgagtcacctctcagttgtagcggcacataaattccagcacaaaagggcctgcaacatggcaatatcaaatatgccaggcaggcttgagccttaggcagtccagcttcagaaaggacacacttggaatcatttaaggaaatgcaaacatttattgaaattgtctaaaacatgaaaagaaaaggctcatgcattacaacaacaaaaaactcataatccctgaagtctgatcccatgactgccaccctccaaaaggtccacagtttttctcaaaaagttcaagcctcagctgttttcctccactaccccggcagcgctcatctccagccaattctgtctttatcattttttaatgcagcagtgatcattttgaatgcctgggtggaggtgaaccagagaaagatacgaaaaaggaaaagacacacaggaactcagcagtgacatctgggtcactgagaaaatacacataatggtgccaatgaccaaccaagggcctcagaggcaatcttttaaaactcattcctgattggttcatcttaaggtcaacctgagctatggagaacctctttcaaaaaagacaaaatggttacctttgaatcacaaacctgttgcattcttgagatgtaccatcttatttttctagtattttagaaaataagtttgacagtattatagggtctgcttggaggcaacgcaacttacacaccaggttagcgcagaaagaaagctgttgtaatcaagccactacctggtcaatcagagtcgaagaacaaacggaactgctaccaagtcagaatattacaaagcttttaagcttggaaaccacagcatctgtgccaagttacacttacatctttccaccaatcaggattcagggatgggattttccttggaacattcatctgtttggtgcacttatcttgttctcactggttggttttctcaagtgtggcagggaagtttgccctccattcacgttcaacttgaaaccaggatcatcagttaaccacaaacatgtctctctctgccaagcaggatatcatttacctgagaggtcttgggaactgaaactttatttggccccctttttgaaaatgttagttttattcaaaatggattcggtttggttccttccttcgtacaaaggtaccttaaggaagcccaagcaagaatgaacttcaagtcggtaagcatgaatttcagagcctttgcccactcctcctctgtgttcaggtgggtcctgatggagtagcactccccactgccgctggaatcctgcatcaaaccttcattcacatggatcctgtagggcaggaagagacattctgtcttctcaacctcatcgacaaactgctgcaggcagtccaggaaggccttcattccacggtcatacttgttattcaagaagacgttgtggctcccatctgagaacaacagtagctcctcatcattagtcaaggatcggaggtaggaatggctcccacggggaactagttggtacctctggaattgcattctggctgtcttggccaaggtgaagaggagtaaggctgtttgtccccaggcggcgttgatctcaccccatcccacctggatgccagggagacagcccaacctgaagttgttgataatgcccaagggaccctcatccaagattgtaaaggtgatgtcgaaaatattggtctttctcaggtgtcgcagctgactctgggcatactccaactggttctccacactgctcagctggtccatcagctccagctggtccattttcaaggcagaatactccatcaagtcctgctccttctgttgattcagctccttgctctctgcctgggctgctctgagttcggcggctattcttgcatgatgctggtctatgtccttcagctcctgaaccagccttgcttcttcctgctccagaacccgcagctcggcacaaagctccatgggcatggcctccctctcctccttactcaccagcgactctctctccaggaaactcctgtagttctggttgtcagattccactagagtgatttgggcatctagttgcatcagaagattgtctatacagtccacacaaagcgggtggtccacgtccttctggccagagaggatttcagagagctctagggtagtattttggataacattcaaagttctcagggatgtagtcttaccaagcagagtgaaggtgcaacagcaggtacgttcctgggatgtcctgccacagtcaggaaggggtctgctggaggtcccgacctgtggctcctcctcagaaactgcggtctttgtggaggggctggcacaacgctggctttccaagggctcttcctgcagtgcacagagcgtctgtgagagtttcaggggctcattgcagagctggcacaggaagaggtttgaagacatcctggaagtctgcactcccaccaaagtctcgtttctttccagcccagtgagtctttggagatgtctctctcctccttccctctatgctttgtgattccctactgagctacctgtagatcttctatagttccccacaggccagtgattctctgaaaaaggaaatgttggttatcttgcttttccctttaaagttttcaagatacatcttaaaactaatctctagcccggcagtggtggcacacgccccctgtcttggaaaacaaacaaacaaaaaaaccaacagctaatctctaaccttaaaatctggccatgctgtattccaccttaaaatgctcaaagcttttatctcatctttagaaaaaagacgtctaagcttggtacaatggcacctgcctataattctggcgttcaaagggtggaggcaagaggatcttgagttttgtttttgaggtgggattttactattgtaggtagttttttaaaccaggctgagcgtcacttgtctcagcctcccagctgatgggattaaaggtgtgtaccaccacacccagtgaaagttgtgcggatcaccagcctaagttgtgctgtatctggacagcctggagtatatactgagaccctgtcttaaaaaaatgtaaaggaagttcaggtagagtgagtcaagcttgggatctgattgttatcagccttagctgcatagttgagtcccagaccatccaggtccgtagcaagactgtcacagaaaggaaaagcaaaaagagacacatgccaatctcagcacttgagaggtagaggcagaaagatcaggagttcaagaccagcctccattacttagtaaatttaagaccaacctgtgttctaagttgccctatctcaaaatataaacttcccaggggaaatgtcggcacactcctttaattccagcactccataggtagagacagttggatctctgtgagtttgagaccaacttggtctacagagctagttccagaacagccaggcctacacagggaaaccctgtcttgaaaaaaactgtggtgtgtgtgtgtgtatgtataagttcaacaagaagcctaattgtttcaacctgactcccaagtccagaccattttactattatacttcccaccaccccaaaatgctctccattccctttgaaaatccattttctggccctgggttggtggcacacaccttttaatcccagcacttggatctctgtgagttcgaggccagcctggtctaccaaaaaaaaaaaaaaaaatccattttcacagttatttatcgtgggaaagaatccctataccatcatgcttatgtgtcggtcagaagacaactctcaagagctggctgtctttctctatcatgggggttccaaagattgaactcagaccattgcttggaggcaaggacagttacccatggaggcatctcctccaggaagcctgattgacctacaaacttagactgctctcttagactgcacttaagagtcctttattgctccacaatataataggcacacaagcatgggaaatgttctcatttttttaaccatcagctcagccatagactaaaacttgattcaaccctggaatcccatatgtcagaggttgagctgaggactgagttgaaggaccacctgggctacatattaagacattttgtttgtttttccagacagggtttctctgtgtagctttggctgtcctggaactctctcaggctggcctcagagatcctcgtgcctctgcttcttaagtgctggcgttaaaggcatgcaccaccatgcaccacaaggagggttgtcaaaaattagaagcagttcttttaacccttatgagttcctgaaagtatgtctgaagcaataaacaaaagaagtgtcccctttaaatttactataaaacctcttctctgggtcagccaatattccagagccgggcaaagccgaacaaggcttgagaccataatggaccatttgctgtgaatttagcaataacaacggcaaatgcatttaaggccctccggctatctgagtcatggagttaggaagggtgtccacaaacctgcctttcctttcccaatgttttcccaagggctggaccatgttcaatgtcacagtcagttctgggtctagagtatgccccgggttatataaagtgataaagaaaacacacaggtgaggactacacccattctgccttctcatccctagatcctgaggctggggaggagcccatgagaccttgatggactgaaaggtgacccccgaaatgttttgttgttgttgttcagggtgtgtctctagggctgacccaaacctgtagctgctacctagtcccaaccacacctatgcagctggttagagtatagaatagtatcgcacagcctggagctcctctggctctcctgctaattagctatttagagtcttgtctcccttggttattgtgtgggtatgtgtgcggacgtgcctgtatggaggtcagagtgcagcttgcacgagtcgtttctctccttttaccttgtgggtttccagaacggaactcagaccctcagacttggtggcaggagcccttggctactgagccagctcacaaatccagttgtgtgacctttgacaaaacttctctctcacacaggtgtgtccaaccttttgatactggcccaggtcattgttatctaccaactacccaaaagagttacaggaaaagcaacccaaaggaaatctcatagtatttgtgttagtattcaggtatttgtactggcctgccctaggagttctgacaggatacgccctcagctgcagccactaagagcaccacctgtgcacattcactacgtttccttttttaaaagagccctgcccacctcccatttccctccctcccttgtccctcactctttcatctccccctccgctccttccctgaggcgggtctcctcctcccttccccatcctatgacccctttcacctaataagaaaacctttcacatgaactctgccacacagcatctttctcttgcatgccactttttaaaactacaatttcaagcttgtattagtcaatacattcatagctgtccgtattcacaggcagcctcatctgataggccacaagggacagaggctgtctgtactcactccttttgattgtaacagggcctgagaccttagcaggccctctgacctttgcacaaacagctccatgatggaagtaccgttcaagctgtagacagcaccatttgccaaaactaaaacaaagacctaatccatcaaagtccatagtcctatgaaagtctataaatggattagccttgctttgtggctttgggagctctacctctgtcaactgaagtgtgtcacctagaatatgggtttgcgaactcaggttcaccctgagaaagccttaatactaccctgggatcccagtgtaatggccagttggctaatgaagactctctattgacttaaacacgtgtccaagtagtcttctttggtggataccacacaaattgattccccctccatgtcctgcacagaacgtgttatctataagctatgagcttctgttaattggggctgaacatggaaccattatgttcacagggatttgtaactcagtgaagcctgggggctttgttaagtgacaccttggaaactcaatgtctagagtggatatgagtgaaccttgagtagtgatgacacaagggtaaataaagggccagggtcagagttcatcacccctccttgcccatctccaatggctcaggtacactcaaggctctcactcacccctgttctctattcaccccaggtcctatcttctgactcaaacatgggagaagcagagtgcttaagtcacaaacgtcagtttccaaagatgacccagccatattgaggtcataacagggatagaggcatagaaagaggcatccagtggcagaggttgcccaggcctccatacaggagaggctgcaagcctggaaggtacaggcagctcaggctctgagcagaccacacagcagtctcttggggccaagaaggagttgaagctcctgactcaccagacaaagagccaggagcagtgtgacccttgtgtagaggagtgatgagagagccaggagccaagggaaaaaggagctcccaaggagaccatgctttcccagaagatccccatctctgagaaatcccttgttttgcaaaagactgcagtgcacaagaaactgacccaagagaaagcctgcatttgggaggagaggcctgctgcaggagacacaacccagagaagtcagttccagaacaaacaaatgttctaaagaaggcactggcctgtcagaagataactgtatctccaaagacaacaggcattgcccctgagaagatgctgagagaagggctggagagatggctcagtgcttaagagtactgactgctcttccagaagaccagggttcaattcacagcacgcacatagcagcttataactgtctggaacttcagttctagggaacccaacaccctcacacagacatacattcaagcaaaacaccactgtatgtaaaataaaaatattttcttttagagaaggggagatgctaaacaataggctggttgaatgatccctcttggagatgtcactggtctcagagacaaacggggccccaaaagtccagcagccccaggatactcccagatccctggggggaagctcgaccaccaccagagctcagagaaagggccttcctcagtgcagcagaggacatgaggccacacctgtggcttaccatcatcccactccaggcgcctcttctccccctgtggacttcactacttacctcttcctggctctgactcctgctgtttcctgctccaggccctcactgctgttccagccactgcctgaacaaagtcaaagatgggttgttggagctgaaagggatacctgagatatgaatggagtagttgagacttcaaaccatgttctgatccctgacctggattccaggaccccagcagccttagcaagtttcagaactttccagaagctctcccagagagctctgaagccttggccatggcacagtaacagcagaggcagcaaggtgaaggcaggctactatcactctcttctttatctcctgggctgagccagacccccagtcaggtctgggcttggtgctgcctgggcctgggaggactccagatctcccctaacccagaagatgaattctgtttcttttccccccagacagggtttctctctgtaaccttggtagttctcaacctgtgggtcatgaccccttgagggggtgggatcatctttcactactatttatttcaaaatttggtactgatctattcaatgaagcattatttgaatacttagtagaaaatattttttaattaatcaaatcatggcatgtgcatttaaatgagcacagtggcatggtgacctgtgtatgtctagaggaaaaagatgctcaaatcacttgtgggttttaaaatgtaagatctttatagtcacagaaaacaaaccttcactttaaaaaaagaatcttctactagaggactggattgggattagggacaataatttcatgaacatggatatccttgtgttacatgattaagaaaatgaagcttcatcgtatagaggcgcttttccaagaaactcatacttcaggcacaaacagcatggaggtgctgcctccttgtggacattttagaatagtcattgtggttgaggagttatttttttcacttaaaaaacaaaatcctgttggggtggtggtggtaggggaagatgggagggagagggaactggaattgtaaaaccatcttgtttctaattcaaataaaaacaaatctaaaaaaaaaaaaaaaccctgctgggtgtgttggtggtgcacgcctttaatcccagcactcaggaggcagaggcaggcggatctctgtgagttcgagactagcctggtctacaagagctagttccaggacagtctccaaagccacagagaaaccctgtcttgaaaaacaaaaacaaaaacaaaaaaaccacaaaacccaaaaaacaaacaaaatcctggcaggcggtggtaatacacacctttaaacccatcactttggggaagcagaggcagatgaaactgagttcaaggccattctgctctacagaatgaattccaggaaggccagggctacacagggaaatcttatctcgaaaaaccaaaccaaaacaaaccaaaccaaaaatactgggttccctgacttctccctaggatgaagtcttgaagtgttcattcttccactaacaacgataaaagttggacaatggggacacacctttaaccccagcacttgggaggcagaggcagggagatttctgtgagtttgaggacagactggtctacatagtgagttctagggcagtcagtgccacatagggagacactatttcagaaacaccaaatcaaacaaacaaacaaaaacccaaacaacacacaaaagaaaacctgggcagtggggtggggatgagcagagaaatggcacatcagttaagagcacaagtggctcttacagaggacccggattttattcccagtactgtaactccaactctagagaggatctggcactctcttctggactccacaggcttttccccacatgcacaaacacatatacattaaaatttatataatgccaatttcaactgtattgaagttcattgagttgtacagttttggctctggttaattttagtgtgtgatgtttttatttctttataaagcttctttattatttccattctctactaacattagaaaatcctttagatgttatcagcatcagactttccctttagcactgaaatcccagaaatgtgaaaggcagatttattcttcttgttagctttctatgacaatataaaaagctgagcaaaagtcacaaagttaatacacaaaatgcattccatttttaaaatggcatcaatagtaataatctctggaaccggtaaagctttcctgcaggcagtggtcctcactcagtggaatattgctctctgagcgcgcgcacactcgggcttgttaaagagctcgtcttctgactctggagtgagctggatgttatccttgactggggacaggggcttcttacaggacggaagcttttcagaatctctgcaaagatacaagaaaacaaatttgattttcaggtactgactataagagaagcaccatcctaagtggagacagtggggagacagtggggagcggcacataaacccttcactgtataattgatgtcaatccctatggagcacctccagggttctgttctgaatacttccaatttgttttgcatttttcttctttcagcctcctcttagctttcaaaatcgccttccaataaaggtgctagtctattagtaacacacacacatacacacagagtagcagaatcaggaatgcaccaaagaatttgtttttaatacagtctgactgtgttgtgtagccctggctgacctggaaccagctgggccttgaatttagggattctcctgtctctgcctctcaagtgctggattaaaggtgtgtattttaaccatctccttactggcaacgggctaaggatgaacacaaacagaacaactaacaatgagctacattttttaaaacaaactcccttctgccggactagtattccacacctattaaaactccaattatgaaaataatacagtaacatttgtctcctctcaatacatattaaacaccactaagttattttctttctcccccaatagctctttaagaacactatcgtaacttggatttcttctgacacgggctctgtaagttccaagagccctgaagatgagtggtggcggagatttccactaacagatgagcctctcaggagctttgtaagatcaaattattttcataatatctggacttcctgtgttgacatttgtaccaaagaaatgccaaagcagagtcctgtaaaagctgccagcaactcaatgtgagtgtagacagcaggccacactcagccagcagtacccacttgtccctttcaccaagggcagtgaaaacaagcagacagccacgggagtgagtgtatgtgatgggagtgtatctaatcccatcagaggcagaggcaggaggctctctgggttgaggctagcctgccctatatagtgagttctagggcagccagtgctacacaatgagacttaagtctccaaaagataaaaggaaagcagtttaagatgggtgtggtgatgcatgcctttaatccaccatttagaaggcagaggcaggtggatttctgtaagtttgaggccagcctgatctcttgctgaaccaacctcaggtgttgaggctaggctccaggatctgacctgcctgtctccatctccaaatgctggattacaggttaggcagccatacctggactttttaggtagatcccgggattcacactcaggccctcatgctcacagaacaagtgtttccaatcactcagctagatccacagccccagagtcaccaactttccaccaatctacatctggtggcacccttttaacattatgggtacgtgtggaagtttagaggacaacttatgggtgttgattctctctccctccagcatttggggcctgggatcagactcagaccagcaaggcttggaggtgagcatcttcgatgcgctgtctcaaaggctcttttaaacgtatttaacgttaaaatttttctttgtgagagcagcagctcatagaggctacaaaggaaatagctctccctaaagccgtagttacagccagctgtgagttgcctgtgggaactaaactcaggtcttttggacgagcatcaggtgctcttaatgaagccctctctagtctttaggctgctgcctaagtccacactgtgggagtctcataggaagctgacttagcagttcccaacgccggcttctggaaccggtcatgttccgaaaacattattggggcccaaacactggtttgtgtggttacatctgtgcacacttagccaacgcagaccccctctcagctcccatctaactactctattccagtactgcacaatgagaggcaaaggggcttccggtctggaatggaagttccaagctggacagagggctggaggtgagcaacagaaatggattcctatgaaaacacagacacagatctggggtgggggggggcgctacaggagacagctctttgtcctgatcaaaaggggaagcaggaaactcactttttaaacccaaagtttttccagagttcactgatctttatctgcagccctggcttgttctcagcatcatggtgttttctcttctggacacttcctggcttcttgctcaggccactgactctggcaggcaccaggggcttgatcttggttgtagagagagagtccgtagaactagacctacacagcccaggtacctggagagaaattagaattgttgttctgttattttgcttgttagggatgggagtgtgggtctccccaaatgccagttttaaccttttgatctaaaagcacgtaagtgttctttatatgtttagtatgtgagagccaaagttacatttacaattttttttttctttttctttttttggttttttgaggcagggtttctctgtggctttggaggctgttctggaactagctctcgtagatcaggctggtctcaaactcaaagagatctgcctgcctctgcctcccgagtgctgggactaaaggcgtgcgccaccacagcccggctgcattttaagttttaattactatgtcttagagatccatgaaatgaaaatccctctgatctgcaagcccctcgcccaagggcagacagttccagaaatgctggaggatcctggttgggagataacaagtcacatgttttcactcccctaaacagatttgcttgatccatctgcaccagatacaattaatcacatgtgggcggatacttgcccccaactggacctgatgggaaatgaattgaattatgggttttcctttaaggccttgaatacttgattctggaccatcttctggaaacccagagatggtcctggtcagaatttaattaaagcttgcttcaaatttggctttacactgtggtagtggccttactctcagtcagtggcattagcaggtattttggcaacacatagcaaatcattctcaccccaggaatgaatagtctatcaccatggacttcactctcacaatttaattaaaaattctagggtaaaaaattttaggataacttggattatgtaacatgtagaaatatttattacatggatcattacatggaaaatgattttttaagaaacagagaaaatatgtttcagttaactggtttaaacatccacagctaagcacaattggtgtccaaagacacttaaaagcaagttttctttttgtttgtttttttggttttttgagtcagggtttctctgtgtgtagctttggagcctgtcctgtaactcgctctgtacaccaggctggtcttcaactcacaaagattcacctacctctgcctctgtatgctgggattaaaggcatgcaccaccaccacctgcctgaaactgagtatttttaaaaattcagaggcaggtattttaattttctatttgtgtgtgtgtatttctcattttccggcaataattacacactgcttctgaaattaaaaaaaaatttctaaatgctttaccttgtttcttgcaagtgtgtctgtctttgaaaagggaggtaacagttgctcgaagttctgatttccttgattatcaagtgatttactgttacaatccgattcctagatttcacagatggaaaacaaaaatttacttgagtattttcttgtttgttcgtttgtttctttttagacagggtttctctgtgtaacagctctggctgttctgaaactatctttgtagaccaggctggccacttgcctctgcctccggagtgctgggattaaaggtatgcgccagcacacctggcttgcttgagtttttatgacaacttgaccaatattcaatcaaaatgtatgaaatgagaaactcaggtaaataacataattcacaaaagacataaaaacacaggaaacaaaatgaattaaatatggttaacaatgagttaaaatggaaaaggcatgtcaatttcactgaagaaagtaccaaagtgtttaggctaaagaaatagtctatacaatagagaccaagacacacaaagtgctgagcagatggtgcttagccctaaatgggacatctttctcagcccccaatccctgccaagggtcagggcatgtcttagaagaggaggcaggaagagccggagcggagaggagtgctctgaaatgttgtactgtggacacggcacagctaccacaaacaagtactcacagagctgtgcaaaacctactccacacacagacacacacacagacacagagctgtgcaaaacctactacacacacacacacacacacacacacacacacacacacacacacacacaatgtgaaaaaccaaggcagctgaaattccctacccctccctccattgaggagctgttgacaggtgatcgctgctgaagggagagggtttcccatgtcccatccctacgtgcatatgggcagcactaattgtacttaatgggcaacaaaaaaggccatggagttaagagtagttggtgctgggtgggataggaagagatagggagggaagggtctatctgaccatagtgcattggatgtatggatgaaactctatctaaatatgctgactcatatttagtctcctgctgtgatgcgattcactcttactcagccacagttccacgatctcttagctgtgttgaaaaatggtcagcactgaaaagaaaaagcggcctccgccatcaagatgggccctgctctgaggtgcttgggcaaatgctcgtttaacttcagcggtgattttgaggagctcagctccccctgcctccgttccctctcacaagactctccacatagtgaggctcctcccagcacttattcccacgcatcaacaggaaggccaggaagtgacaacaggacttggcgtttctctaaggtttcctgtattcctcttgggatatataccgttatcatgcacttattgccttatgcttacagaaaccttcacatttctgctgcagctaacagcggtgctggaagtggtcaatttgcctaatttttctttctttatagaagtgcactatcacgtccatctcatcacgatcacatcttgtttgttctgacaggagcttggcaggtagcccatgctgtggccaaatttgcaaccctcaacatttgaggttatagagctgctccatgtccagcctggctaaacaatttcttacaataaatagggccatgggcaagactcttaagattagactctggctagtgaatggatggatctagttgctgccttttaacaacaaactttcaccaaaggctccaatagcgaagcactttagatgtacacagcgaaaactgatactcattcaaagcaaaatctaaaggacagtaaaaacaaaaacagcattgtggtttcggaacatttataaatcaaatattatgtttaactctatgaattcaattcttttgactattaacctttcctgttgtgagggctttactgtatgtgggggcaagaggacattcagtgaatgagtcatcacttggattttggggagtctctttgttccttttttgttttgttttgtttgtgacagagggtcttgcaatgcagcccaggcagacccccttagggctaggattgcacttatttcaacagcaccatagggtggaagatgtttatcccagaagacagaatggctctcagcacgaggtgcccacagtctgtgagctgatgaggacctcattattcaaccgaaagcttacacagtcagtgaaacagaaagatgtgctgcaggaggaaaagagttccccttcccccaggagctcggcaggcttgcgatgtcctccatcagcaaagctgctgctgattgagaaccgctaactgtccccgtaactcaaatggccctaggacacaacattccatgtagcagaggttcacatgaaatgaaacagatttctagatcacaggacagtagcaaacagggagcagctgcaggcaaagcgagagaaaggcagctggtgaaggggctcattgagtgggcaggggctggcaacccaagttcagttcctaggactcggaagaaggatagaaatgactcccatgggttgtgctcggaacccttcttgtgccccagggcatgtgccaccagactgacagacatgtgcaaactcataagataaataaatctaattaaaaaaaaaaagaagagaaagagaaataaaagacggaagtctcaatggcagccctgacaagctcctcgaacaccaaacagtgtcaagtggggcagactgagaagataaacagcattggcaactttgaggtgacagatttaaagaaagctatgaagccgtcacatcacgtcaaaatgtcacttactggtttacgagcaatattcagttaaggttttgatgttagccaaatcaaagtcagaaataaaagaaattgaagtcagaataaaatgtcttatatatgtgtaaaaggactaaatgcttttaaatttcaaaaaaagaaaattgctattacgttattgcataacgaaccgttatggctgccgaaagggaagctggtcccttcagttttattataaaggaagtttatcagaaataagaaactatttccaaagtgctaagatacaacacacacgaaaacactaacagtcattcctttatatgctatgaaatgctagctgaattagaagttatattaacagtaaattgatagtatcaattcatctcgaggcctatctctgattagaagacaaccatgcacagaagacaacggtctagtcagtcccagtcagtggaacacccggttcacttgaggggcctccaggacatgccagtgtaggtaccccgggagtacaaagaaagagaggcccctcaagtggataaaacgcaagctttctacagaaaggatgttttcaaatgacttatgttatgtgcattgatgttttgtgcgtgtgtatgtctgtgtgagggtgtcagaccccagttatgagctgccacgtggttgctgggaattgaacccgggtcctctgaaaaagcagccagtgctcttaaccactgagccatttctccagtcccagaaacacaggatttttgagtaaaaattgagaaagccagttcatttctacaatgttggcaaaatttcctcagctgtctcatcaacacactattttttcccgtgtttgagtctgaaagccaagactgcagacacagactcacctctgaatccgaatccttactggaaggctgagaaagatttgatgcatttaaactgcacagagagtctatgctttcccgagatggtgtggaccagcccacctcatgcaagggtggagccttagcatttgacatctcactttttgaatggcacgtgtcagtcaaggcacagttctctggtagacaggagggggactcgctctttcttcggaactgctgcaatacagtgcttgaagagggacttggagttcttgaaaaatctctaagagttcttgaccaattgaaacaacttctaagtgtccccagagagaatggggaaacagtgtctacaaatttactggtcttagaagactgagcctcatcaggagacacagtcacactgcctgggatttgagcacttggatcctgtgtcccacttatgccaaccagcttctggccgtctgtgtctggacagtccagggctccaaggccgtctgtgcctggagagtctggttctctgaggccgtctgtgcctggagagtctggtgctctgaggccatctgtgcctggacagtctggtgctccgaggccatcagtgcctggacagtctggtgctctgaggctggtagtggctttgcctgggacagcagtttcatttagaggctgactgcttgctttctttggttcaaagtcgtcaaaatctggagaactgcaaaaaaacctaacaagaaacaggaagaagatcttcttaagtattttatcaagattcaaatatctactgtcttacataaagatggcaaaaagcttttgaattttaattgatgttttaatcctttttttttttttttttttttttttttttttttttttttttttttgagagagtctctttacatagtgctgtctgtcctgaagctctatatacagaccaggctagactccacttatttctgcctcctaagtgctggaattaaagatgtgcaccacacgcccagctgaggcatatacattttatcatggtaacacacacatctttaaagttatttatatggtgaacctttaggtaaaagacagagcccaggcttcttaaatccctgcatttgggagacagaaacggggggatctttgtgagtttaaggcaagccccagtcttccttcccaactagtgttggttagtgtatttctagatcctaaaggataaacagaaatatttataggaaaggtgttgacactaataaaaataattaagacaagacagaaccatcatgtggtgcccgcaccatgactaagtctaatggaacctccacttgtggcctccgagcaacgactaaatccgagtatcaggcgaaagcctggagatttaattgaaaaccgagccgtctggtcgcttgtgctaagagaacatgtgtccgtctgtgttttttgcagggagggagcagacttatatacagacttacgacacagtggaaaaccccaggtgttttttttttgttgttgtttttcggggcagggtttctctgtgtcttttgaggctgtcctggaacttgtagaccaggctggtctcaaactcacagagatccgcctgcctctgcccccagagtgctgggattaaaggcgtgtaccaccaacgcccagcttgaaaaaccccaggtgtaagagctcgtgtttttgatgcccaggcaaggcccgggctgtaattcaggactagaagacaggatgcatctgtggttatcaactcacggagaacccgtaggggctggggcccaacatctctcccaacaccatcagctcctcaaaataccaaaaaaggagaaacaatgggaaatgagaaccctaagaacagaactctaaccacacggtgtatccgcaggagctccagtccttttgcacgctgattctgcatggacagctcccagaactaacggtgtgggagggatccacaacgcactctggtctgaactaaggtgtggtggttcatgtggactagagtcacccaggaaagcagcctctggacacgcccgtgagaatcctttgggttggctgaagtagatgactcacactagcgtcctgaaccgaatacaaaggagacagagctttgtctgtcagtcttcctctttctgactgggtgccatgtgactgaccaggggtctcctgtccttgacacctttccacacgcatgctggactgcacttttgggatgtgacctaaaacaaacctttccttcattaggttactttttcttctgccaggcacttttttcacagcaacagtgaagtaactgagacataaggcaactaagaaaacaagcatgcaacaggcttctgcaaataacgctacacccagcttaaaaggcactctggggacatgatacctgcttctggttcccggaactacaactgcaccacttttttcattcttcctccgtaaaaacactgcgaatttgttccttgtcctagatggagtgtatgcatctgtcttgtgagcagtcccgtcatccaggatgggtgcagacatttcagaagaactaaaagctgcgttatctccacagctgtttttcttggtcttctttgtaaatgaggaatactgactcaataggtcatcttcagacagagcttctaaacaaaaacagaagcatgtgtaaacaaacacatgggctgcttctgttgctggctacttgccctggatttcacagtcgtcgtcccccccccatgtcctaaaggcaaagcatcctttttttcctgcacatgctggccaagggctcacagggagccatatacttgggtcctcttttgttttttgaaagctatgcctcgaaaaaggacacattatttcctagcaaccacatggtggctcacaaccatcatgtaataataataaccaacaataatgagatctggtgccctcctctggcctgcaggcatacatgcagaatactgtatacataaataaatctttttttaaaaaaaaagactgaaaacaattactttatctgttttacaatttgaaaattagttaacatttaattaagttatctgtgtgattttatacgaaattactccaaattttagggcgcaacagaaaaaaattggagggaagcatttatataaagctatgattaatgattgaaagtttttaataccacaataaaaccagcaactatttaccctctgttgtggtttctgaggtaaatgtgactgtgttctagcttggctctttattaccaagccacaagaccaaacatggacagtgctgcagcactgagttctttagctagttctcagtctgctcagcttctaccccaccaaagcctaaatgcacacttcctatagtcaataagaggttggcaggaaggccagcaaaacagctcagcgggtgaagatgctggctaccaaccctggccacctgagtttgacacctgtgacatacacagtggaaagggggaacagattcctgcaagacgccctctgacctccaccttggcatacacgtgtctgcttccccccagtgataataattataaatgtaaaaataaaattttaaaggtggtaggatagggttgggtatgccaaattctagagaaaatattcatttttaaagaaaaccttattttttaaaattgtagctcagtaaacttcaccttaatccctagcaaaagtgaagtctgcttactatgcaggtcactagaagcccttggaaaagaacaggaaaacgcataccataggagccccagcatcagaggccagaccaagttcacttccttattacaataggttgttagcacagctagctggggactcctagtgtctcacagtatcccagtggatagtcagtacctgttaccttgtggagacaaggatctaagagacagggcctggggctctagatccctgtactttctctaactccctcaagcattttatacacaaacacaatataacctaaaatgtaagacacaggggccacattttcaacaacctccatggaagtttaaaatgtcactggacttggctttgacagcaactggagaaattcatcctaagctcagccaatgacagaaacaacaataagtatactcactgccaggagtaatcagtctggctctgcaaaggtaaaagcaaccttagagaagggcctagtgccaccagtgcacacttggccacgttgacctatgcatccactgtcacagtcacgccaccactaaggagttcaatcatacacaaagcacaaagagaacttgcagcctgaagagtaatttccttgggtcacaaccaagaatgtttgaaaggcaatagggacccgacttagttcagggtttgggggtttcaaactacaagacgaacatataaaaatcaactgcactgggttggtgagatggctcagtggctagctagctgttcagtgtgcaagtcccgatgaatagagttcaattcccaggatcaacacgaagctggaaggacagaggacagagttgtcctctgaccccaatggtgcatagtggcaaaactgcatccccacacatacagtaatcataataaataaatcagctgtatttctatatattgacatgaaggagaaataccatcttcaaaaggttcaaaaacctgaaaatataaggatgaatttgataactgattcaacatatttacattgaacacaagagatctccaaagtgtcctcaacagtctctactgaggtgccacttgctctaaattattgatttaacgaaatctccatagcacgccgcccccaaccttggtgtgtgtgtgtgtgggggggagttgttttggtgtagcgctgactatcctggaactcactctgtagagcaggctggccttgaactcagagatctgcctgcctctccctcccaagtgctgggattaaagtcaagcaccaccaccacccagctccataccttttttaaaaaagagaaattgagggctggagagatggctcagaggttaagagcaccacctgctcttccagaggtcctgagttcaattcccagcaaccacatggtggctcacaaccatctgttatgagatctggtgccctcttctggtgtgcagatatacatggaagcagaatgtcgtatacataataaataaaaaagagagaaattgacaagtgaatcctaaaaattacacagaaacagaaagaacctcaaacagccaaatgataactctgaaaagcagaaggaactgcagggatttacaccaccagatttcacgatgagttacagtaatgagtgtgtgatcttgggtcaggccaggtggcagcaacacggaagtggcagtatggaaaaacaaaaactcctcggccaacagtaccggacaaccacaccgccatatacacactgaggagcctgggtcttactgtccaccatctacagtacctctaaacataagagctacaaccgggaggctaacaggaaaaaacaaagaaactgcagtggcctgggcttggaaaagatttctaaatctgaccagctgtcggaaggccctgctacctaaggctgcaatccaccatgtccggacagctctgagttaaccacagaatggtagaactccccaagatggatgttctactctgcctgaccttatctggaaagctgtccctgagcctggatgcctgactgagttctcttaagtgtgacccttgacaccatttcctgcaaatgctctcccctgctgctcatctgacagttaggtgttgtgcttccatctgtgtgatgggatggtactgccaaacgcaaataaagcataccatgagcatctattgtgtgatgccatagctgctgtattcacagctgtctgaaccacacccctaggaaccctgctcctagccatttctgctccctcctccctctcaggcaggtggcctatgacccgggaggaaggagacccataacaaccaccagcacttggaaagaataaaatacataccatttcttggtctcttcaccatggaagacttcctgggaagatttaaccctttagtactaatcacttgtttgaggcccacagtacttgaattttccgtcaatggaggagcatgggaaacaccattcacctcacgtctaggacagtaattcctgtgccaaatgctgttggcaacaggtgacttctgacatgatttgtcattccagctatgacttcttgagtggacaggctagaaaggaacaaggaaaaaggttacttgtacttcctgctgtatctggttatagcaatgttcaattaccgttcaagagaaaagcttttaagtccggcctggtgatgccggcctgtgatccctgctacccaggaggccaagatgggagggtcaggctacctagtgagttcaggcccagtgtgggtgacttagtgagcactcattattttatttcaaattaaacagggctcaggggtggagtgcttgcccagcatgtgtgaggtctagggggagcctggaggggaggggaggggagggaagggaagggaagggaagggaagggaagggaagggaagggaagggaagggaagggaagggaagggagagtgaggaaggagaaaaggaagacaggaagtgaagggtcctgaggaagtctatgttctcataactttgtactttcttctgctaatcttacccttttccattaaacatgtattacgttcccacgtctgccttctaacagaagtcaaactaccccctggctcatttctaaacacaattcccaatcttcctaaaaagagcaatgcagtgaccccagagaaagtgtctctaaagcctgaacttcacttctgcagccctcaaacagcactggaccgcagaggcctatgctcaaagcagccagagcctaacttagaaatctgtttacttttaactatttgagacagggtctcccgtggtctaggctagttgaactgatcctcgtgcctcagcctcccatgtgttgggattacaaccaggagtccccaagcctggacagaaaattgttgtattcaaacacaaacaatagaggttaaaaagaactagtttgtatcagactcacttggcaccacactgagaaagcaaaagctgctttggcatacactgagtcttgtgtaaaactcctgagaaagggtttaagccagcaaatatccattaaggtaactgtttcgccaatagagaccattacaaccattacagaggactctgatatgctaaaaagttggcaatgatattccagtagccaaaggcagaaagacaaaaaagttaagacacagaaaacggactgggttggtggtggcagcagcacacacctttaatcccagcaccaggaggcagaagcaggtggatctctctcaattcaagatcagctgggtctctatagtgagttccagcaaccacagccagggctacttagaaccctgcctcaaaacaaaaacgaaacagaaaatcctgaagcacgaatatcatgggaccaattcccaaccaaatctaagtcttttgctggaaggaaaggtaagaaagacaacattcaaaacactctgataattgctgaggacagtaacttgagggatgagaagagaaaaacagctcagcagcatgcttttagaactaaagcccacggatgcatttactgagaaaaagaaatgggccagaccaggaaaaacacattaagatcaaataatttgctatataactcatttcaaaaaaaaaaaaaaaaaaatctggcttctgcagggttgtggtgcacacttttaatctcagcactcaggtggcagaggcaggtggatctcttggagtatgaggccagcctggtctacagagcgagttccaggacagccagggctatacagagaaaccttatctcgaaacaaaacaaaacagaacaaaagatctggcttccttagcaactcataacctacataaactcagtgcaaccacacaaccaatcatttagcatccttcctggggaaatgacagaattgctcattcaaatgtgtaaagacagcacagccagcaaagtccagattgccacctcagtaatgattccccaaacaataagataaacatgttctgtgcacaaatggcataacattgtaatcatgcataaattcccaaagaacaaaagaaactacagcaactcaaagaacttatggaagaaataaacatggacagaagagacggtgcaaactatcaggacacagcgtggtaaattgtacatataatgaagacagcagtgaagagttcggacacatagcatggtgctagttaaatagttgctaatttatgaatgagcctaaatagcttgtactcaagggtcatgttctgggttttcagcaatgccaagggccacagagtctgaatggcgtaaaaagagaaacaaggcgccgaatgtatcagatatataacaactgcttgtcttaaaaaataaaatcacctagtcacttcatagttttaaaaacctaactaatacatctaaatttctctaggatcaagttaatcattcttcacaaggaattggctagatgtggcacatgcctttaatcccagcacccgggaggcagaggcaggcagctctctgagtttgaggccagcctggtctgcatagtgagtttcaggacagccaagacttcatagtgagaatctgtcttaaaagaaaacaaaaagacaagatttcactatatagcccaggctaaccttgaacagcaattgtcccatctcaggattgaaaaccctgggactccagatgcctgccacaccaggtggagttgttttccatgtacactctgcatagagccgagcacaggaatacttcacagctgctgagcaaagacttgcctcaaagttcttgagacaaaactaaaatgtgcttttgtagtagttcttaaaatgttaccatagtgtctggactgtagtcatcaatctgctcgaaagtatttatatctctgtttccaagcgctctttgtagagcttcggaatcatcgacatacctaggttggtaaggttaaggagaatgaccttattaacaagccattgaatcacactgcactaagaaatgaaatgctgtctactgccacagagaatcttcaaagtttatgatgtacatagatgccacccactgttctcatcaggatcactgaaacaacaggctgggttgctggcctgtgtccctgcaggagctgcccatcttctcgaagggaagcccgagtcaatttctcccttccctgagagatgcggggaaagtccctcgggctcacattaagaaatttaacttttcactagcatggtttttcaaagttgagtaaaatacaacaatctgcacggcaaaatataagaccaatttccaagttgttctttttcactaaaaataatgtgtcagtaccagtagtgttaacaaaggggaaaattccacctcgtggctcagaaaggatactgccctgcataactcagagtttctgggtcaacgtcattgccataggcattcagagggaccagcttcctctggatggggtcgaacaccagctggtagaggaaagtgttgttggctcggatgaaccccgtgatgtaatcctccggcaccgttatattcatcttgagatactgcccaattttcttgataacctaacaatggatataaacatacttcatgtgaagctgaagaggaaagagtgtgctgaccccacatctgacactggagcgtgggaggcaagtcaactgctttaaactacactaaaagaacttctaccagaaaacacagccaggccgcatcacccaaaactctggcctcacagccaggttggcactgttcacccaaaatgcaaattatcaggcttatgtgtcagaagtacatttctagaaataatttttagagtcctttcggcaactggcacccagagcagggaccctacatagctaagtcctctttgtcagtaaggacaggacttcgcctaaaggtttcgagagtcccctgggtaagacatagaccaggcaaaagagaggtgagaagaactgaaaatttttgagaagtcatgggccataacaagtgtaaagaaagaagacgctttgtagacataatgcagcatacttcttaaaaaaggaattaaagttaatacttcacaactgattgtttacttagcagtttgcacagcgatgtagtccttggttcccagattagggaactttagatttagaactttgggatagagtaagaaaggatattcaagcccgggaccagtaaaatgggccagaaaatactccaactgaaactttttcttattggaatattcttagacaagctttggatacttataagcctcaagaaacaggttcttcactgttcccctatggtggttcctattgggcatatgttctagatcccccactttttcatgtaacttttgccagcataaaagtagtaattcataataaacccaataggagaagaaggacattcttacagtctatataaaactagtgttaatgcttcttttggacacactgagggacctcatttatgtgtttgctacccaaacaggaaatgagcctccagaatgcacacatcttatgtctagatatttactgctgattctcctcgtgcaccttttgtaacactcatgtgaacttatgaatcaccacttcctgacactcctcttaagaccatgggtgggatttgggaacatattagtgggactaaagggtgtccttattgatttggctgtgtttttcctcatcaaggagttgctattccaactcctcttacacctttacaaattcatgattggcctatatcccaaaagacaagagagcaaacaataaatatagaactgaagagttcaaggccatcgttagctacacagcaagttcaagggcagcctggaactcaagaaacttgtgtgaaaaccattttaatgggggggggaggggattgaaatggtgcaggagagggtaagaggcgttgtgatttctgttaacataaaagagcttttggcttagttcaaatgaattaatattcaaatttttgtttaaatttctaatacagtatattgagagctataattcacctaaacaaaaattattaccacacaaaacctttcagagtataaatatccttagaccagaaggcctgagaacgactcccaagtactaggatccagaagtaaagagttcttacccttagtcaccttttccctttagtaacactcacaggctacagattaatatttagagttttgaacaccctctgctccttcatgaagtgacagccctcctaccttgacgatgtccgggttgttggccagcttcaggactttgcaggcctttgctaagccgatcccacgcagggaggagaggtagtcacagcccgacagaatacacatgtaccggaacttctcctccgtgaacacgtccccaagctgcctgcacatgcccagtcgtgcctggtccacttccagtccattgccaaactggtccatttttaaaatcaccttcacagaggggaatggtcaagaccgctttgtcatcgttatctaaatcacagtaattctaaggaatcactcttgctccaaaacacaattttttcttcttactttcttttacatgaaagtggccagttttctattgttattgcggcaatatatgctcattgcaggaaattttaaaaacctaaaattgtccacaccccatttaccaattacccagtgttaatatctaatgagcatcctcctagcaatctctgaagatgcatacacacattgcagctgttatcaaaggtaaccacctatggttttatatcttagttccccctttaatagatcattataaaatttaccattaaatcggtttatacattatttctaaataacttaataatatccctgtcaaagataagttagtttatcagatctattttaaaaaatgtaaggcacgtgctattaatataagaaagtaaaactaaccaggcctggtaatacaggctggggaaggaggagaacccagagttcaaggcctgcccaggctttagagttgagtctgagcccaggctgggcagcttagggagactcaaccacagagtatagagagaagtgggctgtggctcagtggtaaaaagtgctcatctagcaggcagagattcacctccatacccaaccacacacacacacacacacacacacacacacacacaaagtcaaccaaaagacaagctaaacactaaagtattcacaggctggggtgtagcttagtggcagacacttgcctagcatatgtaaagccctgggtttattaccagaacccccaaaagcaaaccaagcccaaatgataaagcagtacccagatattaagtgacataaacaggtactccaggtagcatcgtgtatggcagggacagttcagtaccttcttacagccgaatgccaggaggtcagagtcctctgtgatgacagcttgcacaattccagctttgttaagataggccaactgagcatctgcttcatagggagccactaggcagtccactcccagggcacgggcagcctgtgagagaccacagtgagcttgcagcgagcttttggaacaacatggtatgaaatcacaacggcccagtatcaccagcctccacacacacaccaacaacaccccaaaacccacgtcctttgatgtagaatctttctactctcagttctaatatagttcacactgttaatgttttaaatcaatttataggcatgggtgacagctcactggccacacaatttttggttttgaccctagaactcacaaaaagatgagttcaatagagcctatatgtaattccagtaccactatagaaaaatggaaggcgaggaaaaagctggcaggtggcatacacactgataaataacagggaccttgcctcgagtgagtcagaaagggaggactgacactcaatgttgtactgactgtcccattctatctatggcatgtgcaggcctacacacacacacacacacacacacacacctaaaaaaaaaaaaatcaacttataaatttgaagaaatcctgctacatatttggcagtggtggtgagtttatgggcaaccaaattcattatctcaaattacaaaaagtttctacctgaattttgttatgtgctgacagcgtacaagacactcgttgggacctgaccggctcttttccctataaagactgcaggcggctgggcgggcggtctgtctgtctgtctgtctgtctgtctgtctaacacagtactggtgaattccggaccctaatcactgcatctacatctcgggaagtgcatccttctgcctctctcctttctcccttgcctacctcctgtcccttcagcaccactacttgtgtccaatcaagatttctcctccactgcacgtggagctctcttcagggtcaacagagagcatgcgggttctgtaaaccccactccctcctgtatctgcacccccccacacctttatcactttgtgggccatggcatgggtaatgttgacagagcgagtgaagcattctcgggcttctgacactttgccctctcgaagaagctgcttccctttaagaaggttgctttgtcgtctcctgaaagggaaaaacatgactgaatagaaatgaaagcaaacttaagaaataatagtaaaactgcaactacagcaatttctgctaggatgaaagggctgtgcacttaaaactgcgcagctgcagcttcgcatcagacccacggcagaccagcccggataagagtaaatcagttgtcttttggaggctggcttgtgtagctcaggctagccccacactcactaagcagaaaatgatccagcactcctgacccttctgccgctacctcccatgtgctgggatttcaggcagtgtcaccgctccagctgagcaagtgattaataatgcatgcaacgagactgatgaaagaccttccacagttgccgggcgtcgggaggcagaggcaggcggatctctgtgagtctgaggccagcctggtctacaagagcagagctggttccaggacagcctccaaagccacagacaaaccctgtctcgaaaaacaccaaaagactttccacagcaatgtttcatgttaaaaggtaattgtttttaaatgtgacaatctaacacaaacagaccatctaagggaatctgttcatgtacttgatgtacagataccaagattttagaaatttggtaccctatgtcctgaagcatctggccttagcacagttaagccagagatgttaagtatggagtcaacttactccctccgagatctctccacttccttcttagaaggtaaggtgcatccatcaaagacaagaataggcttgactccatgggacagcaacatattaacaaacttcatacaaaatcctacatacctacaggaaggaaaaagaaaacgggaaatgcacttatatgctttgaatctcttaaattttttgctttatttaagaccagatgacatgattgcaaaggatttgttttttgatgctaaagtttctaaaggaaacagttcaaatctcaatgcaagtacttatgggatacgtggtagttaggaagtcatttgcctctctaggcctgtggtgctcaaactatgggtcatgactccactgggggatcaaatgaccctttcacaggggtcacttaagaccatcggaaatatcagatatttacattacgattcataacagtcgcaaaattacagttatgtagtagcaatggaaataatcttatggttggggggtcactgcaacatgaggaactggattaaaagattgcagcatcaggaaggttgagaaccactgctctaggactttctctattgtagattaaaaggctttgacatctttcagtttttcctattttattgttgctccaagtaccttttattcttccattaaaaaaaaaactgacttgaaacatctcaaatctacttaaaagttataagaacacttcatttctcccacaatgccttatcatacgcaagagacatgacagcattatctacaatgcaccatacatggaatttcatccaatagcgccaataatgtctctcaggaccagtgacatcctgattaatgttgaacaacatgatgcttggggtgtcacaatatttcacagcaacacataggctctgccaactcacaaccagaatgctgaggggcagagatgctggacacagagcttctgaagaaagaccccagcaaaccgtggcattactgttcccatatccaggacccagtggcacttaagcttaacttttgcatcaaatatagttctctgaccacttgctgtattctctgctgtggccagtgacaagggcactgcacgggggacaacagaggctgcagctccactgaacatcgaagagcagacgaaagcaaacaaggaatagtaacatcttaaagcataaagcatccggtagcacccactcatttacttccagggcagcacatgccgacctcaatctagcttttccccaaactccaaagccgtgatcatttctggctaatactgctatccctggtaggaggaaaaagtaaagcaattaattataccaaatatggcttcttagttgtcaggggaaattttaaacccatagcagacgttaagcattttagtgtcatcagtattaaatgagtgagtatcatagagtggaccttgtggattccatctctcacttttctaataataaaggatatagcctgtattttaaaaatccttccagttaatcaaacatttgaatcaaaggctggagagatggctcagtgctcaaaagtgccagttgctcttccactgactgttcttccaggatctgggttcaattcccagcatccacactgcctgtaactctagcttcaagggatccaatgccctcttctggtctcctcaagtgccagacacatacaggaagacaaaacaccaacatacatttaaaaaaaagatatcccaaactagaaactaagttttcttggctaagaaactattcaaagaaaatcagttgtggttgtttgaatggccatggccctcacagctcatgtagttttgaaaacttggtccccagttggtagaactattagggaaggattgggaggtatggccttgttatgaggtgtgtcactgggagcaagcttaagatttaaaagtccacaccatgccattctattagctctctctgtctcatgcttgtggttcaaaatttaagctctcagctccagcaccatgcctccctacctgcctacggccatgctccttgctaggatggtcatggactctaatccctgttgttttattatagcaatagaacaataactgagacaccaagtgtagcagtacagtcccataagcccaacacgtgggaagctgaagtgggagtgagggaattcagggtcatcctgggccataaggtaaggttaaggcccacctgggatatacaagaccctctctctctctctctctctctctctctctcaaaaaaaaaaatcaaacacagaaagtagtaataaaaaagtgcagactgctctttttgaaaagcttaaagggtatactttattttccaaaattaaaagcaactatacacagatatgtgcaaaatggggggggggggaagaacagcatatttttatatatcaatccatgtgaacctgcccaaagtgaggtcacagagtgacaccagaacatattgtccctttacatcattttgctaatggagattagcagtgtgttgtgggaaaacgtcatagattctgaaaacattgttaaaaagttatcttaggggaaaaccaaaggcttctcttaagcaaagaataaagaagacaatgtttgatctttgcctgtccatatcatgctactctgactacttaccaagaacaaaagtcaggtctgtaccacagaagtctgacaatattctaaacaccacatgcccttaataaatgctaggatttattgaaacaatgacccgaaaaacaaaaattaaaaaaaaaaaaaaaaaaagcatcaagatgctggaaatttagctcagttcataaagtgcttgcttagcatgcatgaagccctgggctctgtccctagcattacatgaaactgggtgttggtggcacaagcctataatcccagcacatagtaggattcctcctccaggaagcagaagcagaagtctaaggtcatccttggctataacaagttccaggccagtgtgaaatacctgaagactgcctcaaaaaaaaaaaaaaaacaaaaagcaccaaatcattctacttcctaaactaatagacactccaaacttacttatctgtaggttcccctttggctagcttttcagcacaagagatagctcctttgtgaagccagcagtatgtatccactgcgactgcctgtcctttgtacttcttcacattgatgggttccgaagcttccttgatgaactgaagtagtccctgaatccccatcgtgccaagtgagctacatgaaatgaaaagggaaaaagcaacattatagcaaaacctactcaccaagaagttttagaaaaataaactcagcctggagcctagcacagaaactaatagctcatcaatagccttgtccctgtcaacttctgtagctcggaatttcattaatcacaaacactaacctgaacaccactggggagtttcttgtggtcatcttttccaaaacactttctttcttacctagaatcctaacatgtgctctcatctcttaacacagtcctaggcacccagaaggcattaaaactttaagtctctttcaaaaagatactgttgaaagcctacaaaaactgtgcatgctatggcattatattcacccgtacaaaaaggcattcaagggctatatccagagctgcagtgtagaaactcaagttaggagaaagacagtcatttcaagtgaaaagtaatcagaattacgggaatgtacttttatatgacaccaattcaacaccaacagaatgtattattccaaacaataataataagtaataaaaagtaataagccatggtggaatctagggagagtttcatcatactcactgaaggctgtactccagcaacatgaaaacatgtccgctgtgcaaaaacagcttcaaggaaaaaaaaacacttttaatttccactcccttctagccccttacatggaaattatggaaattatagagctgccagccctttcaaagcaaccaatcctccccacaccaaccccagcagttgcttggtatttcccagtacaagtatttctatcaaagaccacgttttttatttgtgggtatgtgtgtgcatgcagaggccagagcaaggtattgggtgtcttccaatattgctctgcctattaccctgatgcaaggtatattactgaaccagctaggcccaatgagttctttggatccaccacctctccttcccaatgctggggtagggttactagcattctgacacatggggttttgataggggtgctggggactctaactcaggtcctcacgtttacaaaagcaagtgctcttacccactctcagcatttatttgttatgtgcattagagtttaaatgggagcatatggagactggtttaagacagtcttttggttgtttgaggagcatatgcctgcagagctggacctctagcagagattcctgggattctccccaggttaagttgacaagcacttggctctccaggcctaagatcatgtttttactacaggataagaggccagcggtgccctgttgacaacataagaaaacagcaaggctcttgtcctgaaactcagaggttcttagacctttaaggccatgcccagtaaccataattccctagaaggacaggacttctgaattttaaacatcagccaatttggaagcaggtgggcctccagccacgatttgtgtaaaatggagagtccaccacctttaaagacaatgtctctaaaacgtgtgtgcattcgtgcatgctgagaaacaaaaggacttaattacattttttacgaaacttcagtaaatttcttctaggttaagtaaatctccagtaaatatttcctctttagcacaggagtgactgagcgccatatggcacaccaaccccaggagatcgcccgtggcaccccaggtaacagcagccgcggctcctccgtaatcgtgtctcccgggaatgaacaggcatggcccgcaagcccactccaggcgctgcggttactcaaacctgcatctgaaaggaaatatacaaagaaaactcgtcgctagagacgagtgtacgtgtggacactgggaaaaccagagacgtggagaccaaatcggttgcctacgggcgcccagcgcacgctccacgctcgcgttctcttcccggagccccggatcccgcgccgtggattggaggcgaggagacctcactttcctccacacagcccgctcctcctgacaccgcccgccgccggcgtaggggaccactcaccggggcgcaggacaccagcaagccgctgccaatgctgctgcaagcgcagccggggacctttcaatttgcgcgggatctcgaggccccgcccagcggacgtgacgtcacgcgcgtcctgggccacagagtacgcctccctctctctgtggtgacccgccttcctctcatctgggtcttgaggccttcctcgaggtatggggattcgcctccaatggccaaggccagcttgaacattgtgaagctggacccagtagggaacgcttatccatggggatgggaaaggggtggaggagggagaaagcggcgccccggaagttgcgttcttgttctcgccggtgctgctgggagttgtagttctcgtttgagcacgccatccaagccacgtacaagcgatctaaagaacgtccaacttgaggtcaaaattgttgttttaaacctggaaaaaaagaactcagctggaattagtcgttagctccaggccaatcccagaatctttcgtctctccgaaacgtcctcacctctgtgcaaattgaaattgagtttactacaaggctttcatgttgcaacactatgatatctgctcttacctacgttatccactatctggctctatccctgacacgagttggaaaaatgttatttttataactaaacaacaagatgggcccatggttcacagacattaaagacatcttgcattttggtggctgccttgggccacatttcctaatgttatcaaggaaagaaagcccctctactctcacttcctcttaattaacttttaaagcatactaattttagaagtcacacaatcggaccgtgcgtaatttagtctcccactgtctttgccgtagcagacaccactgactgaagccatctaagtgtggtgtaagaatctttcccacctctatcctttggagaaagtttttctctcttgctcttctggtaaagggcaatcctccatgctctctaggggaacagaggactttaatatcctaacaattagtggatgaattaactattcctggggaaaagaactcaaaagacacatgttgagattttatgttgggctacattacagaaccccaaacatctgttaacatacaaataaatagcagcagcttgtgcaccggtaaaacagaccactgaagactgataattaccagggtgcccttctcatataccctcccacaagtccctagatacacagctttgtctgcagccccggggaagctggtctttgttgggtagctactcccttttccttgcccaaataacttaactgtaagtcactggactttttgaatggagcaatgaatgtgggtatacagttataggaaattcccagatctggctaatgttctcttttatttggaatactgtagtaaatctctgagggtgtgtgggagggggctgtgtgtagggtgtgtgtgcgggcatttgcgggcctgtgtgtgcctacataagcatggggtgagactttagccatactgggtccctttagttctatctggatagaatccacgttgggcaggcaaagatgaactctttaagtgcatcttagcccgtctattcctctttctttgacagttaccatctgtggagctgcagcaagaggtggcatctagtgctacacttcagcggatgcctcaggtaacagaacacatgttacagctgttgtgtgtgtaggctttgggagccaggtttcctcaggtgttagcaacagctggcattagagcttctaggcaggcacaacattggtatttctcagctcttgacagaagttagtgatacaacaaaacagcactagtagattctcctttaggatctttaaccttcccaggcatgagattcatttatagtacctggagtgaattatcttccagagagcaggcctcaaactcaatcagaattcaggtggttacccctacaactgtcacaccactactgcaccagagggcacattttatttggcacttcagtattgtaggaagcagggtcccgtgctggatacgaccactgatagtttttctccagtaggctccctggcaccttctggtgctcagaaagctaaccatcgtggaggtttcctggtcggttctaaattgatttgtctatctatatcctgcaaccaagtgtgcagtgtcttttagcaatagggtcttaccatctggctatgatggacaaccaagtattgccgtctgcttcataactgtgggtgtaatttgtctagctgcttcaagctcctactgctgttgcttcccccactataatggactgtagcctcaaatttcgaaatagaataaaccttttttctcttaagttgtttgaacagaaaaatttgtcagagcagtaggataagtaactaagatatatgttcttaaattcccgcagagttgtacagaccatacatttttcatcatgggactcagttatgatatttctcattttctgaagtcttctttgaatgggatgtcagtttgatagcacccaaacttcctgaggtgatgctatcctaacacttatcatctcccattctggttgacttttgtctttctatattctaaaaatcctttgaagcataattggtagacttttattatctaaacaaacaaacaaaaacaacaacaggtatgttcgatagaatttatgtgaagtgaaaaagtataattaaaatggttttacaaagacaccctggatttggagggaacattgaaaggcactaactgtccttctggaaaggtagataatcctttcccagaggccaacctggcagttcatacaaagaacataaaggaaaagggaagctaaaacatttcaatgctgcaatgattcttcaaggaatttatcctaagaaaactgctagattagaggataaagatataagtgtgcctatcatccaaaataaaaataaaaacactccaaatattcaacagcaggtggaaagttgaatcaatgtgacccacccataatgaaggaatataaactctgacatcaatgcatatgaatgcccaggaaatcatgatacagaagaagccacacattttgtttatatatactttaaaggcaagcttatcaaaaacttcatgctcacacattacaacatagaagataaaaagttaatattcgatatctctaaatagtagtacacctgaagatttttctatccttctcatggccaaaatttttttaattcttcatacatttatgtttttaattaattatttaattaatttactgtatgtgtttgtggttgcctctctctctctctctctctctctctctctgtgtgtgtgtgtgtgtgtgtgtgtgtgtgtatgtgtgtgtttgtgtgtgtgtgtgtaggtcagaggatagcttaccaagtcagttctctttattctggggactgaattcagggcttgaggcatggtggcaaggatccttacctgttgatccatcgttccagttcacagaaaatatgtgagtttctactgaacttagaaaatagatattaacttagaaagaaatggacatcttgacttgtggtgggtgagtagtatgagaaggaagggcatggcattgggttcaagtgcagtagtgcctcagatgacaagaggagttgtgagatgcatttccgtagatactgttctttaggagcctcagatgacaagaggaattgtgagatgcatttctgtagatactgttctttaggagccagagctttacaaaatacacaggagaaaaaaagtgggtagagtcatcaatgccaccgctgggtgagtctaaggaactacgatgtgcagctgaaacaaaagccagggacagactattctaccaagaaaagtcatcccaatgtaaaccattggtgacagccagccatcgcctttccagttgtgaaggcattttatggaagccataatctctaccccagggatgatttctaggtagttctgatcatttctaggaatctctatccagcatttcaccagtacgatttacaggtactccagaacagccaatgtttaagtcgttatatcattggaagagctactgaagatgggatcacaaagagaaaatggcatggagaggacgatatttctatctgtgttgtgcaaatctagaaatgtttatatatgttaaagattctatactgccttataggaattgccatatgaaaattctaatcttgtgcctaacagacacaccatgtggacaataatttagtctccaaaggacagaaatacctcagtgtggatggactagctgttgatggagagtaaagcaaaggaaaactcagacagctaatgaactcagactggattctggggaagaaattatgcttatcagccctggcagtggtccaaggtcctaccaaggacactgggcatcataaagatgcagacaagcaatgccatgctgtaggaggaaaagagattgctgagaaggaggtgggggggagataaggaagtgtggccgggctccatgggaagtgtccttatttatcacgtgttaaaacttgatcatcacaagtcactagaattgatatgaaaaatatacatctccgtattacaaagatttttgggagccaatgtatttcatgaagtatttcatagattttttgttgttgttgttgttgtttttgcttgtttttattcctggaaatacatggatcagagcaacaacaaattattacgacttaataaaaaaattgaaagctaaatgaaacaaatgcattgaagagaaactcgccgggcattggtggcacatgcctttaatcccagcacttgggaggcagaggcaggcagatctctgagttcaagaccagcctggtctacaagagctagttccaggacagcctccaaaagccacatagaaaccctgtctcaaaaaaccaaaaaaaaaataaaaaaataaaaaataaaatggggagttggttaatgatgaaacagcctttaaaataaaaagaccagcagaatgtgtctgatgttcagaggaaaagacggtaacctgttcaaggcctgtgagtcccttgtctgcaggtggatggtgtcaagtgtgatggagcatttggtaaatgtttttgaccctggaagtgataggcactgtaagacagaacagctctcagaaacatccagattcttggactgagatctattgcatgagttctctaccaatgctcagtccaaaggggtgatcctgtcctcaaactgcatcctcaggctgtgcaccctcagactgcttcttcagactgcatctttagactgcttcagactgcctgctgctcagactgttgccggctctatgaaacctcagactgaatgcaatgagttcctgtctcctcctgccttctattcctctatctgcccagctttatcactcctgtctccatctccctactgctaggattaaaggcatgtgacttccaaatactggtattcaaggtgtgagccaccaccctctggctgtgtttctcttttagactggatcaatctcatgtagtccagagatctgcctgcctctggctccccagtgctgggattaaagtgggagccaccaccgcttggctctgttcctcttttagactagatcaatttcgtgtagcctaggctggccttgaactaacgcagatccgtctgtctctggctcccaagtgccgggattaaagatgtgtgccaccactgtctggtgtctatggctgactagtgtggctggctttgcactctgattttcaggcaagcttcatttgttaggtcacaaacaatatatcaccacaaagtccactctaccttcaatccaccctccacctcattccccaaactattaataagtattttccatgggccaggttctataggatttgccaatatcattgtttcttagaccttggatgccaaatttgccaaaagtttaagaaagtttttctttttgttttgtttttgtttttcaagatagggtttctctgtgtagccttggagcctatcctggcactaactctgtagaccaggctgccatcgaactcagagagatctgcctgcctctgcctcccaagtgctgggattaaaggcgtgctccaccaacgtccagtgtaagaaagtttttcttttaaggggtgtggaaagaacctttcctagtgatctcattccatcctgggttccgcttcctgccaaagcaggtttagttattttcatagtaccgtgttccaccagaaagggaaacagaagtttggtactctttatctcatagtagctgattggcactttgagtctctcacctctctggtctcagagcatcttaggcaggaggacaataagcatctttgcactaataatccttgaggagtatcttgctcactgcaggtactctgtggctagcaggatgtggctctgcgtatttgtaggtaaccctctgagcctttgttttcagattagtacaatggacacagcaatgctctgcttcacaggattgtaatgggaataaagtcagagtcactttgtgacaacataggtaccatagatgacaggggccttctgaatatcaatgcttcttgctctggtaacagtatttcatttccctttaggaactttgacatgtgatcaagtgatgctaggtctccctgcctctttccccacacctgctttctagttttggaccagccatgagcctatcagttgcagccaggaagcatttgcctgggaccacttactgaaataattgacgccacctttcttatgccactgggaacaagaggtaactgaaatattaagatacgagatggtggggctagggagatggctcaacaggtaaagacacttgttgccaagccctacaaactgagcttgatccctggaacccacatggcagaaggagagaactgactcttccaagttattctctgatacatatgacctatggtacatgtatgtgaaagaccctcgaggtgaggagtctccccaatccagccagtgcccccgaagaactcaatgtccagtccagttgatgcaaaaagcaagaggctttaatgaatgggaagcgtttatacaaacgggccctctcagcatgcaggctagagagcagcagcgttccccaggcacaggtgttttttttttttaattttttaaaaaagagtttatttatttattatgtatacaacatcctgcttccatgtatatctgcacaccagaagaaggcaccagatctcataacagatggctgtgagccaccatgtggttgctgggaattgaactcaggacctttggaagagcagtcggtgctcttatcctctgagccaactctccagccccacaggcattttaaaggcaaaaaccataatctttggggggggggttgcccatccattgggcaagtagaccagacctcagaatgtactaatcaatcttgcctaagacagccgtctttgtttttcaaggacttacttatcactctttgactcctggtcagttagtgcctttaatgggctcctctggggagggcagccattggaaattcttggtgctctagctgtcttatggccttgtaggggagattccaggaactgagtcatggggccttggtcagcaagtctctgggtcaggagcaattcttcctgcaaggggggcaggtaggtaggtagcagagccgcatctgttttctagctaatttttaaatcttttatatgcacacacatgtacacacaagcacgtacataatacatactcacaccctagataaataaatgtaatttttgttgttgttttgtcaagacagggtctcaatatgtagctctgactatcctggaactcacaaagttaatttttaaaatataaggtttgagccattaggattgctcacctggagagccttcctacaaaaccaagtccccaaggtttcttaaaatgtcacccatgttcagactgccacttctaaccaaagggaaatttaacataaaaagacaagctccattttggtttcagatatgtgaaaaaaagagaagcaaaacacatattttagaatagatgaaatgtgataaaacagcagcataaaagaaaaaaaaaagatgaagtcagtatcaaatctgaaaggtattactcattctcgtatcagcttatgtcgatattctggagacagtactgaactaatgaagtagcctagggtgtgtttgttaaaactgttgttggcttcagccaggggcattcatttttttcataatcctggaggctggaagcccagcatcagggtatcagcagggtttttttttttcttccctcgggctgtggtatgatgaaagatctgtttaggccttgctctggcttgcacagccagggggtgaggatgtacctttgttggtagtctgtttgccacacttgcaggcaggaaaccctgggggtccagtacccagcacagcataaaacgagaagcatggcggtgcgtgcctctaatcttagcacactccggagatggagactggaaggatcagaagttcaaggtcattctggagtacattattgagtttgaggccatcctgggttgcacgagtacctgctataaaataaaataaggaataatggatgaaatcttcagacatacaaatctaaacatgcatatgtaatcacaaaagaacagtgaaaaaactggccccagatgtcttagtgcaaacacttattagattttaaatggcaggattaaggcatgtgtttatcctctgcttctgaaaatagaactgctgcctgagttaagtcccctggaggctgaaaggccaataactggacagaaattcattatggtgtccttctgagagcagctgctgcacacagaatctggcactcacggcgctgcctggggatcagtgccactccttcgtgcctaggagcctctccgtcttgcattactcttcacttagcattctgctactgttgtttcactcgctccgttgatgtattgatgtttgtttcatggtcccaggttatgttttactgagttttcaatagaagcatcccttctggctatctggtgaatggatgtccatcatcatcttatctccttggaactatgattctgatagcccattgcaactcatgctcttccattaaagtcaaaagagctatgtctattattgcctgggatggagtccaaagctctcggggaaaatggatagaattcactcaacttcagagtgtgtgtgtgcgttacattgacacaccaagaccgatgaattccctcaagctgtgacagagccgcagcataacttagtcattagagatgtgcctgctgctccaggtgctttctcagcctggaccactgtgcagtcattaaggatctcatgaagaaccaagagctggactggtgctgtggtttggatgagctttgttcccctgaggacttgggttggtctgcagcataataagaagtaatagagcttctaggaggtggagtttatttctcctgccactaaggtaattgggtcatctgtggtgctgctaaaggaagggactaatgtagtttttgtgggacacccactagttctggaaagagttgtcacacaagggaaagacccgcccctccccattctctggcttccttaagtttcaccatgtgacctgttccacctgcctgtgttcccacactggggccattgagcatgctataacatagccagaccctcacccaagctgactggatgatggaatcatactcttggacaccctgaacagcacgttaaataaggctctattctttgtaagccttccctccttagatactttgtttcaatgatggaagatggataatgctcttggatgtaatcccagaggacttgccccacttatttatcttgacttaccgcagggagagctttgaatgccagagttggagagcacagaagcatttttaatatctctaactggaaaaaattcaggtctgtcagtagtagaaagaataattgtcatgtatttacataatgtaattctatttaggaacataaagaaaaaaatgtatagggcctctaaataatatgcatgtattttcaaacacaattttgcagtaaaaaggtcaaactctaacatctaattccagacaaagatgggattgtatctactgtcttcctaattccatggtcattgtagctgctgccaactggacctgaatattcctcctcctctctggatgctcctgtttcctaggtaaccagctccaatttgtcatggtgaagaatacaggcttgtggagcgaggcaggttcggcttgagtcacattttactcacatccaataatagccttagcccataacaacacctattttgcttggcttcagtttttcttctttaaaacaggcaataataataaggtttatctcccagatctgctttgtgagaatcccaacagggaacatatgccaaatatgttctaataaaagttgattcttctgttttttcttcccaaatcatattcataaaagaaactcagcaaagagttcagttaactgataattttgaagaagtcagtgtgtactttttctgtttttgcctctgccgtggctacccaaaagcatggagtgtagagctgaaagacactggcttcaaatccctctgggtactactccagctgtgtcacctgtaaaactaggatttaaaattcaccaacactagagggcgcacatgagcattaaatgagtgtgaaatctgtatgactcattgaaacatccaaagtgagtcctgtgtattataaaattcagcccagccacagtcaaacttacatagcacgaattctaattggtattaataataaaaacccagggacagatattggggttaaagctgacgatcagagaagcaaagggactagccactagagcgttctcacctccaccaattctcagacggaaagggtgatcctgtcctcagactgcgtctgtctccacggatcctcagactgcatggtccccagcctgcactcagcctgcactgagcttctgtctcctcccaccttatattcctctctagtgctgggattaaaggtgtgggatcccaagtactgggatcacctttgtgtgagctctgtttctcttttggactggatcagtttcttgtagctcacagattaacagagatctgtctgtctctgtctcctgagtgctggaattaaaggtgtgtacttccactgcctggcctctatggctgtggctagctttgcactctgatcttcaggcaagctttattagatcataaggaaaatatcaccacaaacttactacatagaaagtagagataggtggagcttgtatttcagtcctctgaaagacacctttcccgtatgcctattacaacttctcaaaaacacatttttggggccagccacattaatttttcagaagtgtcacttggtgttaagacattatatagtggttttattttcacagtagaaaaacggggaggctatttaagtcatcttcttttcacagcaaaaggtgggagccaactcttattttttctgaaccctatatcctacattgcttataaaaactcatatagatcatgtttagattaatttcactgaaaaacaatcttccaagtagctatgttagtcaacatttcaagctctgaaaatatggtggatagtatattaatttatgttgagacagtgcagtggctaattctggtttttgtcttgacagaatcacctcagagactaggttctgaacataactgtaaggggttgtctacattaggttaactgagcctggaagactcacctaaattacaggtggtagcattccattggctgggatcacagacacaacagaaagggaaaagtgaactgaccagagcattcatttttctctgcttcctgccacggacacagccagtcaccatgcttggtttgtacagtgctgggactaaactctaaggttttatgtatgctaagcaatcattctagcaactgaactatatcctcagcccacccatgactatttttgatgtggaccattgactaatttaaatgttcattcattcattcattcattcattcattctgtcaacatggtcaacaggcagataattacaatataaaatagatctaattattgcatgtacattggagaaacataagtcagagagtgaaagattgggtgactcaaggtaggaataggttcttcctacttaaactggcatggcacagctagaggatgactcactaagaaggaaccagttggcggggaagggccttagggaagcaaaggacatgctgagagggcatttgatggaagagtatcctcagaagaagggatagaatgggcaaaggccaagcagtgaaagtgtaccctgggggttcccagaaaggcagggcccagtatgcctatagtgatcaaaagccaaagtagtagtgcttctggaagctatcacaagtaggagtctgggctgggtgtttccggatgctgttcacggccccttctccaaagaactgaagacaaaggttcatacagatttgtaaaaccaaaatgaaaattttacttgaagcaaagagagttcagattaaagagagatactctgtcaagattggcagctgtgttgatactcaaaggcccatatttcttgctccctgtggatttctatttataaaccgcatctctctcatttatttgtagtgttattttcatggtgtataaatttccatgaatatatgcatctgtttataaataattttccattccactgatcctttattctcagaaattcacacttactactgtgagctctgaagtttgcctgatggacagaacaagttttatcttttttttaaaaaaaattcaattgtgcacatctacttatttgtgtatgttgaaggatgcctatggaagtcatctctctgctgccaacatttgggttctccagcatcgagctcaggttgtcaggcttggcagcaagcacctttcgcagctcaaccagctcatcagtccttccttttgttgttccagggctgaagctgctatggacatgtatacttacaaaacatcttagaataagttactgtggtttctgtgggagaaaacttaaaacatttaaatgttcttgttttgtatttgggcgaatttagcttacttttggagaactttgacatccttgtaaaattaaatcaatccctttagaatcatttgcatatgtgattatcggtgccttttattatcccttaaaaacctcctcagttgactgcatatgccagattagaccaattttgatactttgttgctttgcttctgctgttattttgtctttaaaatgtttccagttagttaatgattcaggaaaatggtatctttcaaacctgttgggaaagatcagttcttacagtttgtttatttgtgaaagccccccccccttttttttttggtttctcgagacagggtttctctgtgtagctttggagcctatcctggcacttgctctggagaccaggctggcctcgaactcacagggatctgcctgcctctgcctcccgagtgctgggattaaaggcatgcgccaccaacgcccacccgtgaaagctctttatatattaagaatgtttactgttcatatgccatagttatttttcccagtttgtcatttgatctttaattttgtcttttgtaatttttacatttctaagtcttaaattgacccaagaagtcagttctgttgataataatttgtgctttccttcctttcatgcatgatattttgcaaaatgcattgcaatttgttttgtgctcttctgcccctgcaatttgctttcccaaaatacagaatgccaaatctgtcaaaaaaaaaaaaaaaaaatgggttttcacgtttgatccactaggggccaacactcccttgacagacactgctgtgccattctaaaacttatgtttttctctgaggagagaggagactggctaaggaaacctagctgaaaatagccaatttccatccaagttaaatggtcagaaatgacaccgaagagtctggacaaaaaccaaaagctatttttgaaggcaagaagtgacataaggaagagtcaaaattgtcttgaaatgaacaaaaataaagatacaaaacacaaataagacaatttgaagttttgttaaaatttaactcagaaggggaaacgactatagaatgaagaggatctagtttctactcaaaatcctggcgactagcaaacagcaaccatggctttttttccctcccctctctcttctctgtcaggacaggcatgggctagccgactcccacatcctgtaggactcctgtgcaggtcactcagtagaaaacaattctcaaaccccaaacaacacagaacaagaggggtggcttcaattcagtgagcacctgtagacaaggatgctcccgaggaactgagctatctccaagcaggagatggaagatgatttctctctgaattctattaagtcctcaaaatcatatttataacatgaaagtagacaaatctgtgagagaaaagaaagtaaaagaaggggagggagcatgggaaggagaggatggagagaaatagggaggagagagggaagaggcttgatcagaccaatgaaatgacaaagcttcaattcttttatttgtaaaaaccaaagcatcactttttttttaaaaaagagttccttacatataaatggcttttatatttaggtctggtgtggagggatcaaatagcccacatgcaaactgctataaaaagcaagtactgtggctacaaaggtgtacataccagcctgggacttggcttctgaatgcccttcttaagtagggcaagtacgtcatatcaaatatgagagctcattccataaaaggaatttatttttacatcaattaaaataaatgtatgggctggagaatgtagcacagtgccttcccagcatgcatgaggccctggatttaatctccagccaagcctagaccagatctataatcctagcactcaggagtggaggcaggaggatcaggcgctcaaggtcatcaggtgtttagggaatgaagggaagcctaggctagatagagatcctgtctccaaacaaactaaacagacacttaaaggacaaagtttgtttgcacataagataaagtctagtttcaaaatagaatcttttatttaatgttttataactccacacatgcaaacagcgtatctggatcatatttaccccaactcctctttcccagtcccctaagcaccccaactttctcctccaacctccccataaggaataattctaaaaactcaactaaaatgtgtcttgaacatggccagttgcatggaaagtaacttcaaactaatcacttttctgtggctcttgagttagtaccttccatgactgaacatgcacacagaaagaatccgtttaaaatatgaagccacttcacaagagtcattcactcaactctcaggtaaacttatctttatgggtaataaatgcacaagggaaaatgcaagaaaatgacttccttctttttaaaaagcaggctgaggcaggggtatcactgggaacttgaggcaagtctgggttactgagtaggttctgggctagcctccatctgcgctacccagtaagttccagctggtttctgagggagacactctaaaggggagtggcacaaagtcttccatgaaatgaacaaccagagatgactcagctgctctcctattgggaaggcatttgtcttatcttcagtcattgatgattaaaaaactcagatcaaacaaaaaaggcaaattattctatagatcaatgtgcttatatggaatgccatttgggacagatgcctaaagaggaattaacagaccaaaagattttttccttagttagggtttctatatctgtaaggtaacatcacgaccaaaagcaacttggagaggaaagagtttatttcacttatgcttccagtaacagtccatcatgaaaggaagtcagggcaggaactcaaatagggcaggaacctggaggcaggagctgatgcagagcccatggaggagtgctgcttactggcttacttcccatggcttgctcagcctgctttcttatagaacctgggacaaccagcccagagatggcatcacccacaatgggctgagccttcccccatcagtcactaatttagaaaataccctatggttggatcttatgaaggcattttctcaactgaggttctctcctttcaaaagactctggcttgtgtcaagttgacataaaactatctggcacagatatgaacattttaataagcagagaatactgcccttgtgtggatggtaccaatctatattcttattaaggtagtccttttccactatattccctccaagattgcctttaaaaaattcaaatattttgttcttttccattctgttgggtcaataaaatttttatcatgattttgttttatgcttcatctataacagtaaaagttcagcatcacgtagtcttaaagtcacttggaatcagatgaataggaagggaccgaaccctccctacgagtatttggctaagtgtgaagcattggtggataaagttaaggctgtttcggaatgtctttgctgtaagcaccctttgctatgttctttcccattgctggggccagatgctttgaatattcaactgattgacaattgtcagacttgtccctcatacctggctgccccagggcaggagctgctgactgagcaatccctctgttagccaccagctagaatgtccttataacagcagagatgctttgaactctgtgcatatcctgaagaaacgacacaccagttatatataaggaatactggctcccttcatcttcccaaatactctcccttctattttatggactatttaaaattcacagtatagacagagagaagaaggggagggagaggaggagggggaaggggaaagaggttgacaatttattagaaaaaaaaagtaagatcttgacagccaaatacgtaaaatggacatgaacaaaatggtatgatcattaacatttggtcaaccttttgcattttggcgtctctatttgttagacccccggaaaactcaggtatccggggtcccaggccacaacctcggtcaccccaatcaccaggcggattcaagagcttgctgcaaactgcatgaggctttattgttttttttttttctttttaatgagctaaccccatgttagctcgggtctttcacccaccggccatggcgaaccgctgcagagagaaattttgcagggcagcgtaaggggagtgtctaggggtacgcagaggctcacgattggtgtgcctccaggcttggagggcttgccctgtgttgattggccaactggttgttatggcccataggccctcccagggtggttgctatgctctgtgcgtccgtagtaaagtacacccagggtcgtaaagcatagtgccaccagctaacttctgattggttccttgtcacgaggcaggcgtctgactttctagtgtttaggacaaggtcagacaagcacgtgttcagccgttatggctgccgaaaggggagctggtcacttcatattgacctctcaaatgaaaaccttaaaattgcagcaaacgatgtcaagctctatggtgcatccactaaggctattgtagcagcaattaaggaagagccactttctgccctttcctggggcagggagctgctgcccatgggcatggtcgctcaggcctgcttcttgtttcttgttagctgaagacagaagaactctgctggactcttgggcaagggaagtgggaggtaggaggtcacctctgaactgtgggggaccaaaatatttcctctatggtctcactaaacatggagcaccggaaagctccggcccactattgtattgttaatgccagtaaggctactattgtttaccatggcctcagggtaatatgcctcctaatttgcatctctatgcacctaagcatctgaatagcccctcatctgggcagggagaatagaggtatgtgagtaacttgtgaggatagaaggctaggagttaggagctagtgaccagagagcagagaggaaacaaagagagaaatggttccctcgtggtcatgacaggacggttaagaaacagcagaaaagatggctaataaagaaatgactctagttctacaacatggaactgagagctctctaatgatgacaagatgcctgtgtttgatctttatcgccggtgggctgctgggagtttccaggaccacacccccccactcaggtagaacctcatggactaaggctgagacgcactgggtcacgacaaagtggcgcccaacatggggcaaatttgagctggggatgttggctgtcagcattatcaggaggagcagggctgcaatgattcctgtgtcatccccaacaagaagagtcacctcttcttacaggctgtgtgggctcttcctctcctctcagatgcaaccctcccaagctggcttatttgaagttggcattgtgcattggcaggcagcctgctcctcccctgacaaaaagcattttgcattcaattcatggcttgcttctgagtttatttttatacttaaaaagaaattgggtaccaaatatgtccaaatacattccttgtgcattcaggcagttctgtgagttaagccaatgacatctccagacctttcaattcattttcacataggtatagaggtgaggaaccggcaggaaaagaatgcattagagtctttgtttcacaaatgggcttacacaataatcactcagacttgcccttgtcatttcaatgacccatgaagacaaaacatgtaaatggattgccaccttcctcctcctcctaatcctcttcttcttctcctcctcctcctccccccctcctcctcctccttcgccttttccttttcctttttggtttttcaagacagggcttctcttcatagcttgtagaccaggctgactttgaacccatagagatccacctgcctcccgagcactagagttgaaggcatgtgccaccactgcctgtcagatagcctcactttgaattgatggacactgataaatttcttcagtcctcactgatggaagctgggctgatggttgaggagtagagtgccacttaggttccaagccccaaacttcatcaccaccccacttccacataacatctactaagctctttggtccacgatctgttgacagagctgagaatgagagcagtaattctggtatccaagctccatctagagcaagaatgttttctttctttccttatttaaagatttatttatttattatgtatagagtgtcctgtctgcatgtatccctgcaggccagaagagagcaccagatctcattacagatggttgtgagctatcatgcagttgctaggaattgaactcaggacctccgggagaccagttagtgttcttagccactgagccatctctccagccctgcaagaatatttcctagtcagagtagaagccattgtttgccagttggggtcagagtagaagtcattaaggcacctgctctaacaagggtcatcagtttgatgaccttggcgagtgacttgaggttaaaggccacagaatagtcaggtttataacttcagatagtcagcattgcgacatgtgacagaacatagctgtatttatttttataatcctacaacactggcacccacattaccattaaaagcattttataaaagttgccatcatcatggtgccagaactttctatacttggtcctgagaaaacagaagtgagagtgagctaactaagggctattattcttttacctttctatcctaaatccctctggagtaatcgagaaaataacctaattctgaggaaatagatttatacctctcaggggagaaaaggggcaaaaagaactacaaatttatgagcctgttcaaatcttcttatcccttttcccctaactctcctttttaaaagactttgtcatcatcatcatttttattgttattatcattttgtatgagtgtctttctatgtgcttgtctgtgtaccagtatgtgcctggtgcgccctgaagtctgaagaagatatctgatcccctgggactggagctccagatagatggtttcgagtgctggaaattgaatccaggtcctctataagagcagtcagtgttcttaaccactgagccaactccccagcccactctccctagtttctctgtcctaccctatttccctagggtcacttcctaaactaccatacccatttcattaaaatttatactaagggtttctagaaactgttgggccaaggcaaactatggggaaaataaaaattccttaaggaaacaaaactaaatggacttagcattataattcattaggaaactgggaatagcataaccaaacagaattctgaatagattttttttaataggaagttatgcacttcaaagtcatctttactttcgcattcatatttgttatgagattaatgcaatgaataactttctgagtatttcataatacatgtaatagagactttggaaaacccaaaataatttatttattttacaaaaacaccagaaagtactcatgtggtgttttgaatgtagaatgtcctaaggaataggaactttacaattttgcttccagagtggaaatgtgggacaggtgggacctcaggcaaggtccttcagtcaccagagaataaccctaagggttattctttctctttttctgaacagctatgctctgagtggtcatcttcccaagcaccccctgccatgatggcccaccacagatccaatccctctgtggactagaacaccccaaactgtgagctgagacacgctgacgactaccttaggtcttcactacagcgatagatgatgaacatctgataataacctgatcattattttacttagtgtgctctcatacattgcatcctgaccgcagtttccccttcctcacccctaactctcccctctcccctagctcctctgtttcccttcaaagaagggcagacctccgagggatatcatccaaacatgccataacaagttacaataagactaggcacaaaccctcatactgaggcaagacaaggcaacccagtggaaggaaaagggttccaaaggcagacaaaagagtcagagacatccccactcccactgttaggagccctacaagaacaccaagctatacaatcataacatatatgctgaggacctagctcagacccatgcagggtgcctgactgccacttcagtctctgtgagcccccatgagccctgcttagttgattctatgggctgtgttctccaggtgttcttgacccctctggcttctacaatccttcttcccctcttctgcacacaccggatacttagagaataataaaatgttctggaatcctggaatgctgtaaaagtgtgtttcaatcatctgttaggtcaaggcgggaatgattggataggccaaataccagagtggaatttcaataggcaggtagcattagcctcaggaaatgaagctgaaatactacacagtgaggacttggattttgagcctgaaggcatagactcaagaaaatggatcccgtcatccccttttcttctcttcatcattacaacagacagaggagcattcctctgcctctgccacaaggctgttacaaggtacactgaaaaaaaaaaaaaaaaaaccacattagccagaagccgtaaaagtcagggctcaggctgcaaggatagtgttatctttcactggaaaatataaaccctgaaaaaaagcatcctttgattcttgtctcaaacacccactgtaaatgttctctcccacaccctgcttttctcaaatgctcctttattcctacatcagctttcctgactcctgcttctttggagaggtcacatcctgcctctcaacactcacactgtagctcctggaaggaaatgcatagtgtggacatgtgactgccgtgtctcttgatgccatctctccaggcagctggccagtccaaatgttcatgctgcaataatagagagttctgggaagatgggaagtgtccttatcccttgccctagtctctgacatcatttctgatgatgaggtgtctctatgtggcccaggctggctttgaactctcagtcattctatctgcactcctggatgctaacatttcaggtgggagccagcacatcatctctctctctgtgtttctgtctctgtctctctcccttccttcattatttccttttttaaaaagatttatttatttattatgtattcagtgttctgtttgcatgtatgcatgcaggccagaagagtgtaccagatcttattacagatggttgtgagccaccaagtgattgctgggaattgaactcaggacttctggaagaacagccaatgctcttaactgcagacccatctcttcagcccccctccccatcattttctttagtcatatgattctagttttctaggcactttaaggccagtctcttccttttgacttgttttttttggaacctaggctgtctactttatctatcagtctaatgaggaacccagagagcatggctccctaaggcttcgctggaaaataatttgaggaacactggatgtgcatcattaaaaatcttccctcacagacttcctgggctttttaaacctgaaatgtggatgttgttttattcttcaaacagcttgccaatttaggtctcaatgttgtgttcaaaggactttatttcccgaacaaagatgctgagagaaggaaggcagtgtcagagagacaccatgtagtcaccgaaggagtaacatgccgaagcattaaaggtaagccacagcctcatgtcatcacatagaggaatagaaatgagttaatgcacaagagagagctagttggcaatatagctgagccattggccaaacaactgtaattgatatattaccctttgagttattattttataagcggctatggagacgggaacccaaggagtgtgagaaaaactcccaactacatctacacttctctctctctctctctctctctctctctctctctctctctctctctctctctgttgtttggagacagagtttctttgtgtagctttggagcctgtcctggaatttgttctgtagaccaggataacctcgaactcacagagatcacctgcctctgcctcccgagtgctgggattaaaggcgtgtaccaccacaacccagctaacttagttctcttctaaggaactttccaccttactgttttgtactccattgggtttgccttggaattgaaccagaacccctgggagaaaggatgctgcctacaggcagacagctacatgggtgggtttgttgccactttctgaaacacatctgaagctgctctggtcattcattactccaggattgtaaccatgatggaaagagcataaaacccagttgcccagagtgtttttaattttcctctttgctactataaagaataaccaaaatgtcacagctggcataaataagagtatgacaactactaagccgttagactgaggggtgacctccttcctagttagggtagttgtgtttatttggcaaagggaagcataggatgcaggacaaagaaaaggaggcaccaaaaatttttcccagatgcaattcttgtaagacaagacctaggtggagtgtctggctaggtgaagagaagttgaaaaatataaaagaatatttatatataggtatgcattgcaggaatgtattttcctaagtagcttcttatgaacctatatataatcttcacaaagctctatgatgtaggtgttgttgtaattgttatattgtaaatgaattcactcgtgcataagacataaccaactttccctgaaccattcatctgtggaccaaggtgtgtacctcgtgagacaacttcagggcctgtaatctttgccacaagctctagatttgactcttcgaactgtgaagtatgggagtttaagacatttctttaaggatccagtgccactccaggacagatgtgtgtggtggatcttgtctagagcctgtcagtctgtccctccagaagaatctatggaagaactgaggagattctggtacctcagatctaagacacaatttgaacggaattcaaccagaacagaggaagaagcctctatcacttgaattgtcttgtagatagcatctaactgtcacaaggcacaggtgaacttgaagctttctctgtgactatgtttcccaagtaacagagtttagtattgctcatcgtgttgctgctgcctgcagtgggggattaatagtaaaatactgaagctccaagtgaccactttggcatgtcatttcctcatacacgctggttatttataactgtcctcattagaaaaaaatcttttgttctgtgtggtcagaatcttttagatctgtccttttccaaatccctggtgtcttttattcatcagtgattaagtcagtattgtttgttcaaagtaaggaacagaaaggcagaaattgaacttcctagctgagcaatgtgtccaagtcattctctgtgtgtatgagcaatatgtaaactcatctaatgtgcccagacatcacaagatgttttgaggactactagggacttttagcttatttctattcattgagaatttttatttaacacatgtgcctctgtgctctcctcttctctatggtttttcattttctttggtaggaaacagatataaaagcagatttttttaaaaataaaatgcattcttcaaagatgttgccataataaaaatagtagtacagatggcatgtagctacaaagtctattctaactgaggcataatcatctattatttaataatataaaaatggcgactggtaatagaatcatgaaccctcttagctagactctttcatcttcacctacctggacatctaaatcctgccaactcttatgcacctattttcttactgcttttaatagggtgtgtacttctgtaaaagaggaagacggtttttactcagataacaaacacaattcccttctctttgaggcccacgatgctcataactgagaagaagaggtgtgcatttctcagaatgggagagtctctgtgctgtgttacctgcgctagcctccattgctgctcctccaacactccattgcttgtgtctgctgctggctcctaggtgatacatacctaaaaagcaggggtcagttccatttccagagaatctctattttatacaatatttgagtaaattaatatcccctttaatcattactgagtaaaaaagttgtctctaaaaacaacacataaacatggaccacccatgaataggtaaataacattgtgggacatgcatagtgtaaaaatatctaaagtatatagttacagagacagggaggaaatgccagacatcctctccttccttccctccctccctccctctcttcctccttcgctccctctgtccttctttccctttcttccttccctccttcctttacagtggagactgaattctggaccttgcatattctaagcaagtgttccaccactgagctattcctcagcctgttttatttgaagttcttctagattaaaagtacaactgcacacaatatggaactctttcttagcaaaatgaatacagccacattgtgcacacacagagtttagccacatgaatagagcctgtttgttgatacccaagtaactgaatgttgagtcacatttcactcctgaaatatttgggattttaggcaagtttttgctgacatctagcaaatgttgcagccattctctccccatatgcagatggtatgtgtagtgggtagcatatctcttcagtgttaatctataacacaatccagaagtttccttcatttccaaaaatactgtaatatgcatttctgtgtcaaataaaaaccatggtggaatctactctttctttctattctgcttagtttggtggaatctcaggctctttctattctacttagctaggtacctcggctagtcgcagtctgacttgaattttccacttgtcctttcttatctttactccagagaactctctctctctctctctctctctctctctctctctctctctctctctctctctgtgtgtgtgtgtgtgtgtgtgtgtgcaaatgtttgtgtgtcatggtgtgcatgttgggaccagaagaaagtgctggttgttggtcctcaccttctacctgtgtgagacagggtctcttgttctgttctgtacactgggtagctggcccacaagccagcagggattcccctgtcttcgcctctagtactaccacaggtgtgctgtaattacaggtgtacactactgtatctggattatgtaggggtccaaactcaggtcatcatgtcttcaaggcaattgcagtgggtacactgaaccgcctacttaggcagactcaggatataagaagggacaagaaggaagtcgtcctcttgctcttcttcttcttcttgctctcttctctactgagctgccatgtcatcccaggaagaggacaccagtggaaggtgtcctcgataagataagtcttataaaatatatagatttatgataattaagactgagctagcatataagaaatcctagtcaattggccagcagcattgtaaactaatacaagactctgtgtgttattctgggcacccacgtggtggcagggctcaggcagatggagtaaagacttatcattacaagtggctattaccctttccctctgcctaccccttctgcagactgacactctattctttgatcactgcagtttgcttctgctcaacttctccactttttttggtcactacactcctctttaattctcagaacccatgagcctactctatacttcaaaagtttgatttttgaaagctagctattttcaaacaagtactgtttatgggttccaccttcttgatgtccccccccacacttatgttcccttgataaaggtctggctggtaccctcctgcctcagtccagtgtctccatgcattcatacatccccaggtccttttggtctttgttccaggagcatctgctttagaagagccctgggttcctcaaagatctcttctctctctttcatcaattctcattttccctttcattcagtttatttccctgtgaaatcataatcattgcttcaaccccctaaacacgtctttagtcccagaccctcatttgaaagtacacatagggtatctctcatcatttctgcaccacattctgacatcactctgacatcctcactacacactctcccagccctcacagttggttactctgtactcggtgacagtataagacttctagactcctctttcatgagttgatgcattaaagtcacttatttctgcgttgatcacctatgaaagacctcacctcaaatggctgtggtagcacacatttgtaatcccagcacttaggcaggaggattatgtattgtagaccagtcagtgctacacagtgagaacatgtttcatagaaacaaacagagaccaccaccaccaacaaatagcttgccttcaatgcctgtagggagacactgtagccccgcctcctaggagccactacaggtgtgcctggccatgcccatgagggcgtggtcaggggaggttgagaatgatgggggggactcttaaggggccgcagacacgtggggaaccccttctctctggcctccctagcttgctgcctttgggcacgctctggcttgcgcttgactggtgtttatctgaataaagatatcttaactttatggactatggatcatctgcgctctcgttataaatgcctctgattcttccttccatttgagcacagctcctggctcaagtgggagcacaggaagtactgatgcacatctgactgcagatatgctctgcagacttatttgagttgctcagcagcaactccagatgcacaaatggtgaagcccatcgtcatggcttagttttctgacccattcagatacccgtggaggtaattaatctcaagtttatgatgtacatagataacctgagagataaatgtaggctgcttgtattgagtatttgaagtttgccactcaagaactttcggtgagattgacagaagttactccctcttgctcagctcaatgcaaagagttataaaaccttggccttgattgtggtagcttcataccacaacccaaaggtgcttggaagaacattctagacctgacatattagttcagccccaagcgtaccaagcacaactgctataccatccatgctttctttcattctctccccagacttgaactgtgtgacaacctccccagcagattgacttggtctccactgaatgactctggtaagagaaggggatcctgaaactttagtaatgtcattgtgaaatgatatttctttaaaatctatttatttattattattagcaagtaggtatgctcttggccatgaatgtgacatgcatgtatggaggagagagaatcacttgtggagggggtcctctccttccaccttcatgtgagttcccagaattgacccaggccttcaggtttgcatcacaggtggcaagagttttcacctactaagttggtttgctagtctgaaaatgtatacctccttatgcccaatttcttgacattacagagttattttcctcagttgtaaacagaattgagtaggatatgtcttaccatactcaattagtcagcaaacactagactcctgtcatgagaaagccattgtattcaacacaacggttgatcaaataaggagaaaatgcaattttctcttttaaggacatctgtatgctgactcattcagaaactgattctgttgtgtgtgataacctgagtcagtcctaaacttaaactggtctgtacatcatgatcacctgggtatctttaaaataagaaggatgctctggcttctcactatgaacagtgaagccagcatttaggggattgggcctatgactctgcattgcattctgaacaatgaacaacaaaacaaatgaacaaaataagacacaggatctaatttcatctgtccttcgccaaatcagaagaatggtgatatagggcttgcccttcacatctctgatgtccatgctaatggtctgactttgtttcatagcgtccttacctgtcacagtacttcagtgatccacacactgtgcctgccacacagtaggtacccagttggttttgtgattttgatttcacagctagtatagcccattcttttgggatatgttcaattctcttcctcttgatacccactcacaagtctgatcatgaatcactgcagcgtggcaagcaggtaaagtgcacaagaaaagagtcagagcttcattcaggataaagaaactcatctacattttccttgtttctgagttttaactttactgaattataaactacaaattcctgaaaattgtctcactaaaaatggagaaatgaacatggcttctttaagttttccaaaaccatagacttattaccagccagaaggttatcagagaagcaggtgagagagacatggaaactaagaaggcactttgagagcaaggtgtatgcttttgtagtctttcaagctggacccactgtgggtggatacacagatcttttcaagacagtgaagctgctccccatgatactgtaatgatggctacagagaatatgcaatgtaaagagttaacactaatgtctaccatcgaggagtccaatctccatgaccagcttgatggaatttagaatcaccatggaaacaaacttctgggcttcatgtctgtgagggattttctagactggcttaatgaggtgagaagacccactctcaaggtaggcagcaccatacactgggctgaggtcctggactgggtaaaaaggagaaagggagctctcggtttcctgtctcaaattcagtgtggctagtggcttcaagatcctgttgtcaccccttccacctccacgatggactgtagcctcaaactatgagcttgagtaaacccttcctttcccaagcttttccactgagtgttttgttatgacaaggagaacagtaatggatgtaacaagtgacagtgggtcacaggtgttcatcagctctaacaagctactctctagtgggggtgttggtagcagggtggctgctaatgtgtcagagcaagtggaattcagaaaaaaatctgcagctcttctcctcagctttgctgtgaatctaaaaatactaaaagttcacacccattcacacgatactcagtacactcacatacatacaccttacatatacactcatacacatatacccatgtacacacacacctacatacatatacacaaataaaccgcacttccacacatatgctttctctctgtctctctgtctctctgtctctctctgtctctctctgtctctctgtctctctgtctctgtctctgtctctctctctctctctgtgtatgtgtgtgtgtgtgtgtgtgtgtgtgtgtgtgtgtgtgtgtgtgtctcacacacatactctatttacttcacagcagacctttcccacaggagggctgcattaaccttacaaaaatacacataataggatatcttgaaaggcggaacatttgtgggagaatataaaatatgaccattctctgaaacagctgtgagccattgcaagtcatagatgcctgcagccccagactcaggggcctgagaactcatcaggaaatcaccagttcaaggccagcttgggcaacttagcaagaccctgtcttaaaaataattgaaacagttgctgggagaagaaaacagaatttaatcaaaatattctaggttataattattatgattttgtaagatcaaagctgatcagttttgtagagaaagcatagcctttcataagcccagactcgagggaacatgttctctttgcaagatagtccatgggataggggtgattaccgtcactgtgtttctgcagtaagtgcatcactgggtcctcctttccagtttgccagtgtccttttgtttaactccaacaaagccaaagataatgagttacccaaatgtggaagtccaagtgtattatgtaaattgccaactgttctgctcagggatgaaatgagacaactcaagttataacagtaatattatagaaagccatagcatgatttaagaatgcaaggaataacttcttttgtattgtacaaaataacaccttggttttagtacttctggcactgagataaattaagctttcctgaaagaaagatgtggtgaggtaataattaccaaaggcattctgtataccagggaggtagctgtaggcgtcagaccccaacagaccccacagcgcctttccgtgtgtcactaacatttggtgacccatttgaaggtttgactgtaaatctgttcagcttttgattggcctaagcaagggaatggagggcctgggtgaactggaggttggtttgtaggggtgggtgagctgctgaatggaaactttgcaaaccacattgtctctgtcgtttgctttcttgtttttattcaacatccaggcattagaagtgagctatccagtgaagggcaaatcatttctcctctagtttctttcactggcatgtggtggcttgaagacagaagttacaaaacagctcagctcttaatgagtagccataccatgctgtgatcaacttaaacagcttgtgggtaccacagcagatcattttgtcgattttgaggcatggaaggtacacagagggaaggacacctggatttccagttaggagaatccagcactgggacattaagtaacttctctgatgttagacagattgtgagtagccacaggattttcattgtatatgttacctgaacatggggctgtgttacataaggaggttttcatacaagtatatacattttacattgtgtatgttctctatattctcctttctgaccttgttaacccctgctcccaacaccgttagtcacctttgtcccctagttttgtttttactttcatatctcacacatccacatccacacacacacacacacacacacacacacacacacacacacacacacacgtccttgtgtatctatatagaatctaaaaaccacatgtgagataagtatttgatattgccaggcgcgtgatatgttgatgtgtagtcttttgagtatacaccctggagtggtagggctgggctgtcacgtagacctaatttgaactttttgcgtcccctgatttccacagtgaaggctgcacacttcccagaaattcaactgcaatccctttgtttgtgtcactccttgctggatacatttgtgaagctgtcatgtagcaaattcttacgatgccactctgccagtcacagtgctagatctgaaagacactgtgcgtgatcaaagctgagtttttacctctgacccagattatcttctgtagaagaaaagcagataataaaacaaccacctacaatgagtgtcagctggcttgaggcactgtaagaaaggagagaggatgagagccaagggcagaggtggcaggtgaagggtggcatttaaaataaaggtgtggcagtgggggcggagagctctccgataagcatatctttgagcagagagctgaaggaagtggagaagttccttgggggacgtatttatcatatatgttggccaaaatataaaactctctcttttgagactttgcttgtattggagggtatgttatggcctacacatcttaagactttttttgttttgttttgtgtaaaaattatcagcagcgattattatcacattgataattattatgaagtgttctcagcttagtgggagtaaaatctgctagactagaataaatttaattatgtccccaagtgtgacaagatatggtaaaaaatatcctggccactgagaggaggggtgggtgggtttggcctcaaaactggaataaattgaatcacagatgggatttcaggatgctacagaataaagatagctagtatcatggctgacattcgtatcctccattgggtttattttgatagctcaattcaataagactgtataaagtataaacttgccttactctcaaaaaattttaatctctctctctctctctttctccctctccctctctctctttcgtgcatgcatgtacacacgtggaggccacaggttgatgctggatgacttcctctattgctttccatttttgatgttgagacagtgtctctcactgaacctggagctctcaaattcatcaagactgaatgactaccaaacccaagagactgtcctgtctttgtctcctcccctccaggaatgtaggctagaaatgctgttcctggtctcttatatatgggtactggagctcaacttcagatccttctctttgtgtgtcaggtgcttttccagctgagctatttgtccagctcccagtgtagtttaaaaatcaacaaaagccccccctgcccagttttcatttttctccaccttcccgtcttcaaaaatcccttcagtatggtccattaacatctggttctagggcttattagcccaaagtttcatactggcttcaggtttatgccagtgacaatcccatttctgatgctatgatgtatattaaggttcttcagtagaacagaactggtggaatgaacagatgctgaaggtggatttattagatcgccttattcaatatgatctgggtagttcaacaatggcttcttcgcaagtaagagctgaaaacttagtgactgctcagtccatggggatggatggctcagcagttgcagaaccactggcccatgttgggttgtcaaagaggatagttctgatttgatcaaaggatggtagccacggatgtggcaacaatgacaacagcagaaacagtaaatgcacacatgaaatgaaggcgagaggcacagagcaacagttcccccccagcttctccttatatccgagatgccaccggaaggggtaacttaccttaaagaaagctctcccctttcatttaacctttccaggaaacacccttaagacacacccacacgaatatctttcaattggttacagatctagtcaagttggccaccaagatcaaccaccacaggtcctttattcttcttcttcaccctcttcctttagcactgctcagccacggctgtggggagagacctgaggagactaaaacgaccacgagcatcccagatgaaatgtaattccatgcatctcacccttcaactgctttaacaaatgaacagaatctctttttttttacccatctccatgaacagactcttcggggttgaaaacactaatcatctttaaaatcttacagaactgaagactgaagcaaatattatggggttaaaagtgaagtgtcagcagagctggctctttccactagtttcaggaagcgtctacttccatgtttttcaagctccagaagcacaccacatgtgccctggaagtatctccctgcatcctctgcttctgagatcggatctcttgctatcgacttagaagctcttgccgctctcttacaccagcctttgtgattatctggggctcaatagataatgttcctgtgtcagaaatctttaactgtatccaagaagtaccatgtcatataacatattcaaagactagggaaccggggtagggaaatatttgggaaaataactctgtatatccaccatagtgttactttttaaagcatgttatatttagttggtaagtagaatctaaataactttgatacttttcttgtttattgatgaaagaggatacaatgtggatacaaatgccaacaatatcagtaagaatgatagcagcaagtctttagttgcattttttaaggatggggcattgagcactgttcatttactacattgtgtcatttctgcttctagctttctttgtcgtggcttgttctatcacctgtcttgttttctagtcctttctaccatgcttgccagaatttccattccactgtaaactctcccttctcttaaaacaagccagggtcagatgtctataaggacacattctaggttccatttcttttatcctcgcagggccgtgtctctgttaccctcatatgaagtggtctctgaggcccctgttctctttctgtgtcatcttttttcttcctagtcatgctgttcccagaactgcaacacttgttcacactggcaaggaacatctggctcaggtattttcagatgatgctgtggatatttcattgacctcaggacatagagttccttgatctcagtttcaatgagcttcaacttcagaaaccctcactgtagagagaatctttcactgtggccgttacccatgctttgtaactacccagttagttcactcatactcttaaatttcatgagcccattctgaccacagcctgccacttttcttttgagacaagacttacatagtccttatgtagtctaggctgttctcaaatttgcaattctcctgcctcaacctcctgagtggctggacttccccacctagttgtcaataagtcttcctttctttcttcctccttttctttctttcttggtctttaaaactcaacaggacatgtaatgccttgtggaatcttgttatatctagacagtgctatacacaatgctttcttccacccttcatgaatacaagtttcctcactcttaaaccaactaccaatacccttcactgctttcactcgagattcttgtaaagatgtcatttgtggtatggactctggaatcaaatagaagtggataaaacttttagctcctctgcttcccccaaaatgggactttggagaaaattactttatctctctaaaacctctgttttctcatgtatataataaggagataacaatatcatcgagtgaatgtttaagccagtgtttaaacggaccagcaaaaatgaacactttagtcaaaataaactcgttttgtctaccaaatagccaaagtaatagtaaaaacccactaaatacatgttagttattattcatgatggaaactgagccaagtggcagaagttccctcaactttctcctatcgtaacagttaattcatctttactggtacccattatcttactgttttgtgatacgatggaggtgagtagtatatcattcttctagcatgtgtgagactctggatgtaatctcatacatacatatatatgtatatacattgagagagagaaagaaggggaagatgaagaagaggaggaagaagaattctatcaggtctaagtcaaaccctactgtaataaatcccaaaattacccctccaccctccttcactttctcacaagtacccttctttagtttctcacaggcatgccccttctgtttctctttctgccctttcatgatttacttctcaaagtctttcaacaagccccagcccctcccatctcaaaagaatcctccagctattctatatctagttctcctactttcacagccaaaactaggttatttttaatagagaaatataggctggatgactcaacaccatcagaatcatgaaagagctgaatgaaaacacatcacaggcccaaacgacttcctattatttgacttgatttccttatcaaattgaatattattgatggtttctttcttgaacatctttcttgaaactcatggcttcttaaatgtgagatttctctctggatttcccaccccagtgtctatgttttaattctaagcatcttttcttcttcttcttcttcttcttcttcttcttcttcttcttcttcttcttcaatctcttcttcttcctccttctcctttccctcctcctcctcctccttcttctttaaaagtgatttattaggtttttttttttattttatgtgcatcagtgttctgcctgcatatatgtttgtgtgagggttttgatctcttggatttggagttacagaggaggagaaggaggaggaagataagtaggaggaattgtctcaggtctaagataaatcctatgtgagctgccatgtgggtgctgggaattgaacctgggttctctgaaagaggagccagttctcttaactagtgagacatctctccagccccagttctaagcatctttctaagcaagtcttagcctcttaattctgtcgttttggggcagagaaattctgtctctactgccatcacctgcattcttattgaaactaatcggtactcattgatactaggcttttgatacctaactttctctcaggcccagaactctgccaaagcatgggaatctggaaggatgtatcaccacctaaaataactgtaattccatggagagtgtgttaaataacatgaaggaggttctaagaaaacaatgcatttgacaatgaaagtcaaagagacggaagctcccactgctggtggaatcagtaataaataaagggttttggctattgtccttatttttatttcatgtatgtgggtgttttacctacatatatgtctctctgtatttgtagtgtcaatggagaccaaacaagggttttggattttctagaattaaattacagattgttgagagctgctatgttggtgctaggaatcaaaccagggccttctgaaagagccctgagtgctcttaatcactgaaccatctctccagccccaaataaagatttttttttttttaaagcggagttgctcaagcttcaaagaaattgaaaatgtctgaacgccagtaacataggatgaagatatcaaggaaaaggttaaagcctgtctgaggtggtgagttttccaggttgcccagaattgaatttgtccgaagagataaaaagataaaagtgactagatcagatctagatctttaaggatagaatttctcaatcagttgtcagtgagtgcatggtgaaggacatgtgctttgctcttcctgttataaaaatagtgaccccagcagatgatgggattcagcggtgacctccagagaggttctggcttctgtgttccagaacaaagaactaaagatacctggataggagtaagaaagcaagaggctttgttgaaaaagtatccatttcccaggaaggtggggtttagtagctcaaatagtagcaattgatgcacaaaggatcaaggcttttgtgtcatatgtatgaacttagcgagcggtcatttacatagtgaaggcttttccacatatgttctgtctctgctacatgcggtactacaggcaacctcatgcattacagatattgtcaatgtcttagatttctacacagttttgtggggtttagtgttgtaaggaaacacagatgaccctcaggcaaccagagtgcccctccgcaattgttccagtgtctggatttagtaggctgccagaagcaaggctggaggtggggcaagaagggtagagagctgcccagcatatagaatggtgactagtgtgatgtcgacatttgatctagagactgtcctcagagttctagcgagatacctgtgtcacaaccatctgatcagagttcctaaatagcacatcagtgtgcctgtagcatttcaaacactgtcagagaagcaaatggctgttataattagactttctacatcttagaaaaaaaagagattacaccactaaaggtgttatttttttccagagaagaacctctaacaatgtgaacagtcctttcatagctcatcattaaaaacaaacaaacattgggtaaaagaaaagtttctctttgaaggttggccacatgcaacagttgtcaacatcaggcatgatagcagttttattctgtttttgacgtttgatagatagatttaaaataatttattctgaaagatagcacacctacagaaaattgaacaacatgtggacacggcaatcttctgattttacataacagtgttgtctcaggagagagaaatgggaagttcccagggcccctgaggagtactagcctctatgtgtccatcaggaatctattggagaaaacagaggatgaccataaaatacagacagggtttgttgactggctttgccgtaacccaatctgggagctttgtgcatgtgttatacaagctgttgcttctgggtctccttctgggtttgaaatcatcagggcaggcaaccacggatcagagaagctacaagcttgaacctggtgatggtgcacaggttgctccgctgtcaggagagcccaggctcagggacagtgcttgctaaaggtagaccactgagtccctcagtgccaggtgcatcggcattttgtgcatcatgattagaggcaactgcttcagtctgatttccaggcagcgactgtgttctggtagtgatgctgaccctgaattgcttctgtgggtctatttctgggctctgctgttcctttgatttatttgtctcgtctttagatgacagtgcattctgaatgagagtggcttcatcttaagtcttgaggttgattctccagcttggtcattttccttcaatatattgagggcttattttgcctttccatacaaaccttagaaacagtttgtcaggattcccagagcaacttactagggttttcactgacttgttagatcaaattgggaagcactgacacctgggttaatattgagtcttctgatctttccatttagttagttgtctctagtctgacatctttcaccagctttgctgtttcttcttatagatcatttatgtattttgctaatatttatacccaaacatttaattttggtgggctctaatggaagtgggattgcgtttctaatttcaattctgtctgctcaggggtgatatatcaaaaagcaatttactctgcgtgttaatcttgtgtcctgaaaacttgcagacagaggcacgctttttgttaattatgatgaactttattttgattagcaatatccagacttaagaaattaaccatcttttcttagaggtattggtaatttggatatcctctttggtggagtttctgttcatgcctactgtttgttcagttagactgtatttttcttatagatatgtgggcattcttcatatattttgcatcttccatttcaaatttataatgcaaataccttttctactctgaggctcattttttttcactttcatgtgagtatttttggtgaaaatgtatttttaactgtagaacagctcagtttaccattctgttggttttttgccctcagcacttttaggtatctcttttttttttctgtgacagttgaacctggtgcctggtacatgcaaggcaattactataccactaagctgcatcctcagcctagtgtgtgtgtgtgtgtgtgtgtgtgtgtgtgtgtgtgtggtttaagtgcccttgccctggactcagggagaatttttttaatttaaaaatcacttcatatgtagaattataattatatgactgattttttaaaagattgatttgtgtgttggtgtgcatgtacacgtatgtgtgtgggtgcacatgcgggtcagagttgggggttgggtgctgtgtagctagagttataggcatttatgaggaacctcagttcttctgatagagcactaagtactctttttattttatttttctttttttttgagttataaacacaattgaattacttgacaatcacagttcccttctccctcccctcctcccctacccccccactaaaaccctatcgcataccctttcttctaatctatacctgacccaacctttctgctccctcacgacctctgcatccttcctcttcttcccttctcattctcgtagctccctcccccctcttcccatgctcttaattgaggactaagtactcttaattacacacccagctgtccatcccccatgacactaactttgtaggcattatatacggtaggaaacatcttcatttattttcaatagagataacaatgcagtaccatttacgcagagctaacccttcttattctgtgctacaatgctgtgctagagtcaaacatctagacgtgtgtgaagactgctgtctatgcttcctattcaatcctctagtctatttatgtattcttatgaactgcagcagctttgttaattttattttattttgtttttgtaggttttttttgaaatagggtctcactgtgtagccctggctgtcctggaactcactatatagatcaggcttaccttaaaactcagagatctgcctgactctgcctcccaagtgttaggattaaaagtgtgtgtcaccatggccattgtgttaaagtttttcattctcagctagattatggagtgatgagtttgtcttcctatgtccccttaatttttctagtctttcagtctatcatgtctcagcactaggaaggaccatatggagggaacccattgttttaactaatcatgaaagattagtctttcatattaaaaaaaaaaagaccataaaaacagaatgtagcctttttttcctcaaagcctttgtgacttgtgctgaaagtgagttatccatgttaacgcaaatattggtacagtatttgctttctttagagagcaccccactattctcctgctgcatggattgcttagtcattgttttgctgatgcaaactaggcctttccagtctctagtcacgataaataaaattgttgtgaagatccattcttcctttattttcttaatatgcactatgattttaaaatacaatctacttatatactagtatgatattaacatgtgatatattaatataccattcctttaggttggtttatattttatatttgttcctgtcctcttatattgaacaatttagtgccattgtatgaagtaagttcattatgttcaaatttagcctctgacaagttcttagaacaggagtagaaggcagccagggtctttgctgaagtgtcacaggagtggtttctcgcccagttgttaatggtgttactctctgaaacaccttgagctgggcttctgcagtctgccttgctttactgtcttccaggctcccactagattgaccctgtaacctcgcttataacactcaaccactgtgctagtctaaagtttcaaagtcctctatatatgtctccaaataaataaaccctggtcaggctcttcacagccacagcccactctctggtacccatttctgtatcagtgatttttctgtgactgtggtaaaattccatgaccaaggtaacttaaggaagagtttattttggctcacggctcctgaacgatgagagtccaccacagtggggagacagcagcatgtggaaggcatggtaataggaaagggaagccgaagatcacgtttaaccagaagcatgaagcagagagcaactaggaagtgggactctctacacactcaaagatagaccccagagacaacttcctcccacaagactccgcctccaaaaggttttcaacttttttggggggcgggcgggcaggggtttcgagacagggtttctctgtgtagctttggaggctgtcctggaactagctcttgtagaccaggctggtctcgaactcacagagatccacctgcctctgcctcccgagtgctgggattaaaggcatgtgccaccaccactcggctcttctctaccttcttaaatagcaccaaaacctggagaccagtgttcaaatatctgagtaggtgggggaaattctctttcaaaccacaaaaacatatgtcttgtaacagtttatagttggggtttgttttcttttatgcattctgaaagccagtttgaatatagtgtctattaagtgttacataatgttcagtatatttaggcttacatctgtaatgtttactgttataacttaaggggtgtcagggttgcagaaagaagctaacaaggtcacccttcataagtgctttattagactatggggcccttaatggggagaactggtctccatgttggaagaggagtttcattaattcattaggagagatagcttccctgtgtggaatgggggtgggatgatgaagtgtgccagcagggggccagaggaaagcgctttcaaatacccagagcaaagaggacttttgataagttccaacagggggcaggcaaatatcataccatgtggtctagtctggactacatgtcaagaggcacagagtcagacacttggtgggatcataaactcatagctttgtttgtttgtttggttttggtttttcaagacagggtttgtctgtggcttttgacgctgtcctggaactagctcttgtagaccaggctggtctcaaattcacagagatccgcctgcctctgcctccagagttctgggattaaaggcgtgcgccaccaacgccgggctcataaactcatagtttagaggaggggctgggcttctcttccctgaccctcatcccagcctgagtgtttgtcagttctttgtcctaaatgataggttgcaggtgtgtgtcctgatttcagggtggggtgtggggaaacacagctgagggctgagatctggcagtcgttgtgcattttctatttatccaaccctttcatgatttttcatctcttgctttttagagcaagtaatttttatcattctcaattccctcctgtgcttgtccatgtgttgttgctagtctagttgtttccacagagattatcccgttcactactgacaaatcagagtccaaatgattattgttaatcttaccttcttccaggcaataaaagggcctcaaaaattacaacagtccttctcccatctttctatttttgatccagtgtgtgtgtgtgtgtgtgtgtgtgtgtgtgtgtgtgtgtgtgtgcacattttgagttcattccatatgtgtgcactgcctgtgaatgccagtaaagggcattggatgcctctggagctggagtgaaaggtggtcatgagctgctccacttgtcctgggaaccaaacacggatcgtctgcaagagcagtgtgtgctcttaactatgaagctgcctctctagccccacccaggtccttactctgagacctgttttaactgctgctgtggttgctgcttcatcccattggtaccctgtgagttagtgatgtgttttccattgtggtactcttctccatcttcgtgtgcccatctatttccccttgctttaagcatcctctccagtattctctttagtgtgtgtctattcctgttcatcctctcaatttttgtttgtcaaaaccttacttgacattttcctgtccttcctgaaggatattttctcatgattggtaatactgggttggcatttgttttatgtcaggagtcttttgtttcctggcttttcctcctttggctctatgcagaagctgtctgatgtcagtctacctgtgcaccatacaaggatgtcatgtccttcagtctcacttgattgcttctgtactttttctttaccatttgttttaccatttttcctatgaagtatataaatttgcattgctttctactaatatttatctctaaaaacgctcatcatttcccaaattctgtggccgttacatgttataatagttaacaatgaaactgcagcattggttagcttgggaaaaggaagctgacacataatccccttcagaaaaaagcagtttattaggagaaaaggcctcaaaatcatcattggaccttcacatgggagttagatatatgaagatatgaacatgatggagtcctagagggaagtagagacctggaggaaagcccgaggaagggtttttactaacttgctctttaattgaactactctatttatttattaaatatggtttgttcatatttttgtcatcgttgttttagaattccctgaataatcctctcacagagtaagaactcagaatttaaaaagggactttttttttgtttgctttaaccaagtggtggagtgatgctttggggaaagtagatgaacacttgttaccatggcaacacttttattactcagggctcagaatcatttcctgaagaagctcaggttacctaattctcacgttccaattctgatacttttcccatgctttatgtttaaaatctgattcattatcagccatatttcaatgctttcaatttttttaacatgcatatccattgactgacattctcttagctgctaagcaagacagacactattaagggcagactctttatcagcctgtctccaaaatgtcttttcctttatgttcaggccaaatttgatgctgccagatgagcatgcccgaggcatttgtccaccatttaaatttagcccttcaaacatgtgcttacatgagcttgagcccaaaattatgtttttccttggattttctttagccttaaaataagcatgttcaggaatgtaatgctttcttgagtttgcccaggtatgggtcatcctctactaaacatatattggctacttaaataacatacccatgatccttcagtttgatgaggtccttgctttcccttgcttgattccacccataaatctttcccactcccttaggtcttggctgtcttgttttagtttcattatccaagaggagagcccactgcctgcacttggtctgttgacaaaagatacagccctcacttcaaagaataaaagagtttattctagagccaattaagagtgttcatggtggaggaacacaatcagacttcttcaaataccatgttccaacaaggcatgaattttatggacttttatggtaacagaacaaagaaagttgtaaacttaacacacttttcaaatattggtgagcacatgtggagatgatagaaaatggctctcctaggatcctatattcccatgttgagaccctcgataatgacatttttagaaggattaggaggtgtggtcttgttggagtagatgtgtcttcgtgggaggaggtgtgtcaacagaagtgagctttgaggtttcaaaagcccatgccagggtcagtgtctctctgcctgctgcctgtggatcaggatgtaaggttctcagctgctgctccagtacctgtctgtctgcttcctgccatgatgataatagactaaccctctggaactgtaatctagacctcagttaaatgcctccttttggtaagagtttctttggttatggtttctctttacagcaatagaatagtaactaagatatcacatcaggaaggcaggttacagcaaaattggagaaaactgagctttagccttagatgctatctgacagcattcttagctctgattggcagaaactaggggcctgttcatacattccagaggatttacctaagggtcacaactgacactgagtcatgcatagaggcagacaataaatagctactaatggaattagagatgacctcaaggtaattgggcttcggactggcaacatttcaacctctccatgtcactgacattctcatcaatcaatcagtttttgtagtcacagcttcattcctggaattctcctttacgtctcccaggtgacactacccttgatgaagcagacaaatagtgagaggctggataggatgcttttcttgtttaataataattttcctggaagatctggaggctgaagcagagtaatcttaaattcaaggccttccagatcagcctagcaagaccgtatctcaaaagagctgttgatgcagctgagtttgcctagcatgtcaggaccctaggctcaacttcaaataaacaaagaaacaatgacaataatcctctttggatatacacagcatgacacacacgtaatttgactcttactgcacacgttctaattgtggttatggattggagtgaacaacaggtataggtgaaagctaatggtcactaccaaatcatttggggtccatttatgctatgctactgatcccatgtttccttgtgccatcttgttgacaataacaagagacatttttctatgtatagaagaagttggcaaactagctgcaggctgttgcttgcttgttgtcagggcctgaggtcaccagaaccccttgagtaatctccatttccaggatcacgtgggatagagggatgtgtaaccatctgatggtgcagatggggtgttgtctggactttgtggcctcctgtacaacagccagttccgagtctactcttcaccttgtaatggctgggaagaaggatgaagccagatttatttgtgggactagatttcttttcaggcttttcctccgtgactgtggaataaagggcatatttattagtaaaaaagcattatagacaaacttcccaacttttaccactaaagagttttcatcctcttagacaagcagtggagtgatttcaacaatccctgtgagtctccaacaaaagagtgttgatgggaggaagtgaaagtcccaaagggttctggaagagctttggagctaattaatggggtgcttctccattctaggacctgtggacactaactggaaaaggttggcagaaggacaaatatgagtcgagcccaaaacaaaacaagttccaggctagccaggattacatgacaagaccctgaaagcactccttgggacaacaagatggtccaactgcggacagcactttctgcacagacttgacaacctgagttctatcccctgatctcattgttcaaagtgggaactgactcctgaatgctatcctccgacctctacttgtatgccatgtcatgggtgtgcacccacaaaaaataaataaataaaaaatttaaacccatagatagatagatgcatatagatagacacattttgtcagcaacattcaatcagcatttataagacactagacgagcaccatatgtttctcagatatttctgggatttggttacaaaattttgtagcaccaaaagggaagaggagacatacaaggtaaagaaagtgacagaaagttctgaggcccagcctctgtcttcatggaccttttaggcctgggcactaacaaggttgtatctctgctcctctctccgtgagacgaaataggagcctcatgtccccccatgacctgcatactgcagcagagggaggatccccactctccaggtgtcctctctgcagtagtctagacttccttcgtttctttcctgagcccactactcagcaggttctccctccttcttagtgtcagtctgaaagaatgagttggatgaaatgcgtgcccttatgatttacaatccaatagaagaaagacagtgaagagaaatgagttttcaaggaaaagcaagatgcaatagtagaaagggggaattactgaacgacaagaagtctgatggtgatgagggtaggaagaaaataaaactgaatgaggaggctgttgttgtttgtgtgctcttagaggtattcccaccacgagatcctagaaactcatgtacttccaaattatactgtgttatatttaaacatttagactctgaagccaaacttctgggtttaaagcccagctctgtcacagggttctttgggaatctttgatagttgtttatgccctgtgctcgggttttgcaactgcaaaaagagggtgctaattttaatgcattgttacaaagatgtgagaatccatgccaagcacacagccccagacttggcatattaatttaaagtaaaatcagccattataataaattatatcatcagatgtgtgtgtgtgtgtgtgtgtgtgtgtgtgtgggtgtgtgtgggtgtgtgtgcgcatgtggatactagaacatcagcatcaagtgtcttcctcagttatctcactgaccttggagcagcaacttagctacactagctggtccgtagtcccagtggtctgttgtctcatctctccagtgctgagattacagatatacactgttgcaccccactaatgatgtgggtgctgggtatccaagctcaggctcccatgctcacaatgcaagcactttagcaactgagccatatccccgggtccctgagtatctttttgtatgtttgtttaaaataaaattgtgagtatttctaggtatcctttggagaaactatggagtatgttggcatatataccatcttcaacgaaaccatttttctgtgactgtgtgtttctataaatttgaaaataggttacatgacacagagttcacattcttatgctttctccacgtttaaactttcttgattttcttttcttttcttttttttggagacaaagtctcactacatagccctggcatttcttgtaactcactctgcagaccaggttgtcctcaaactcacagatatctgcctgcctctctgtctgagttctgggattaaagttgtgtgtcaccaaacttggccctttgtttgatttttgtggcacttacggattgaacccaggactttgcacatgctagttaactcccactgagttatcaacccatatccttatagctatgactaagttttaattccactatgctgattcttaagacctatgtggtcaccttcatttctaagctttggatttacttagaagataaacttatatttactatcagattagctaaaactataaagaataaataaaaatatggggcactaaaacatctgaattgtgaaacccaacacacacacacacacacacacacacacacacacacacacacacacacacacacatatatatattaccttttacttttggattacttataacatgctgcttcatccattccttacaactaaaagcaaatattactgttataaaaaatgctttcattgctaatagctctttcttgaataattgacagcatggctgattaatgggactcatccatatttccagtcagtgcaaaagataactaaattatgaagatattttccatcttttttttctctctttttattattattattaattcaagttagggaacaggcttgtttcacatgtaattcccctctccctcttcctccccttacccccattccttctcccccacctccaacctaccccccaccccatccacccaccactccccaggcagggtagggcccccaaccggggctccaccaagtccaccaaatcttcctgtgctgggcctaggtccctccccatgtgttcagagacaaagtgcatcccttcaagtgggatgggctctcgaagtcccccccacacaccagggcaaaacgccagtccacctccggaggctcccaggagtgcaggggcctccccattggcatccatgatcagggggctggattagtcccgtactggccttccaaagagcgtctggggtcgatatgctttccctttttcaggccaactgtttctgtgggtttctccaacctggtgcagaccccttcgatcttcattcctccctctcttcaactaggttccagatttcagcttagtgtgtttctgtggatgtctgcctctgcttccaccagccactggatgaggactctaggatagcatagagagtagtcatcactctcattctaggggaagggcttctaggccatcctctcctccacttcccggactgtcagatcatgtcattcttgtaggtctctggagatctttgatattttccatcttgatttaataaaatagcttttaaaagtggttggtgttgttgttactgtgtctgtaatcagttactgagtttgcaatgggcaataaaagccacacactgggctgcatctttctcttaatgctggatccatgctgatgactggatagatgagtgtaggttaagtcaggctcaaggaggcttctagggctattggaataaagtctgaacatgaaatctgaagggcaagggctcaggcttatcgtttaatcagcatgtggtctttggtaccacctgccgaaatgcaaaatggacctagcatttcttttaacttaattgcaaaaattaagagaatcttttagaagaacacattgtaatttttaaaaaattgcatgttttccctgttacttcatggggatataactcttgctggtaagctcactgatagccagggctcccacagcctccataagtgcagttagactccaaagtgaggatagctacacactgcagccatgttgtatccagttgcttgtcttctaaagccacccgaagaccttatttggtgctggagcagggtaaccccatgtgtccagacacacaggttgtattttagtttcctcctctcacttctacccaacacacacacacacacacacacacacacacacacacacacacacgactttaatctcactgagctaaacacatacacatctggaatatccatgaaaatatgcactgaaataattttaggctcaggatgttttgggggacaaagaagcaattaaaaatatgtagtatgtgcatatggaattagagtgtcctgtgacacgcacgaaacttactttctcatgttgaacatgagcgcctttcttcttcccgtgaacaccgtctaccgaatctctttgtgcttcagagccaatgagtggaaggaatcttagactggtggggcttggcacctgcaaaccacagactgaggtaagcacacttagaacgtttacttctggaatgtaaacctgagacacgggtgccacatgagaggcccacttgcttcaagcacatgccccctttcagacatccattgttccgtctttctccctgtgttaggttggtttgtgttcttttgattttttaattaaaaataatatatatatattaaattgtatttgggtgttctgcctgtaggtatgtacatgtaccatgcatgttcttggtgtcttcagttgctggaagtgggtattggatcccctggaactggagttatagaagttgtgagctgccatgtggatgctgggaattgaacccaggtctctagaagaacagcaaatattcttcaccactaagtcatttttcccagctccttgcttttgatttttttgagatagatttatgtatttcaggctggttgcgaactctacacccttctgcctctgccttcctagtgctgggaatatagatgtatataaccctattgttaattcagtgtgtgtgtgtgtgtgtgtgtgtgtgtgtgtgtgtgtgtgtgtgtgtataagcactcaggtatatgtgtgccctcatgcttatggaggtcaaagattcttactagctgtcttcctgattactctctgctttctttactcatgcagggtaactagagcttgccagtttaggctggtcaggctagccagattgcctagaagatcccctgcctctgcctcctaagcactgagattacaggtgagctgctgacttctcagctttcctgtgagctccgaggatgtgaactctggtcctcacacctgtatggtaagtgctttatctactgagaaatctccccagccccccaccttatattttgaggtccagtctctcactgaacctcaagctcactaattaaactggaataggcggtcaagggattcttctgtttctgcctccccagcagtggaattacagatgcaccctactgtgttctgtttcttggtgtgggtgctggcgatccaaactcaagtccttatacttgtgtggcaagtcctttaatgactgacccatctccccagttaattgttgattactctcagactcattgttgttatctactacaattaacatgaccttataaagataagtaatatttaagatctatgttgacattgacacacttggtatttggtttattatttcttggtttcatccattaatcaacacaggttaccttggggtggagacttggagatttgatgaatactgggcagatactagcataggcacagtgatggagtatccagtgacacttaagcattgctagaacatagggacagcatagggagagtgtggcagaaaagcctggcaaagccagatcatagaagttttatatgctactctaaggcatttggattttatcctgaaggtatggaccactgggtcaaagctcaaagtcactcttacctgtaatggcagaggtgagcaattcaagctactgacatacataacccaagacttgcctaggacaggacccagtacatttatggaagcatccatgggctgttcgtattaacaatgagaagtcagatattgtatcgccctgctaccactgtagttatagaaacttctgacttaccctgtatatagttatagaaacttctgacttaccctgtatatagttatagaaatttctgacttaccctgtatataggcagagaaccaaaaacaatccctgcttctctgttttctgtcatgaaaccttccaaagcatatcggtgaatctacaaaacaacacaatgatttactggaaagggcgtgttccattcatcaaatatctgtcacatgcctgactcactagtgtaaggtcttaggcaagctctctcttgaagataaatttagggaagcttgactatcatgttattattgtaactgtaaaccgcatgtcagaaggaagttaccagaaagctgtctagtttcatcagatactccaagtgaatcacatctcaactttacaggcatcaaagcccttttgttcactgtacaagtgaggcaggaagacaggatggcaagagaagaaatttgggttattcaagtgtttcaaggactctacaaagcctttctaaggattttaaccaatttctttactacttcagctatcacctcaccttttgtttgtttcctatgtgtgtatgtgtgtgtgtgtgttgagttttggggcaagtctctcttcgttgtctaggccagcctagaactcactatgtagacctagctagccttctgtcctagcattcttacactcatctcctgagcactaatgtacataacagggcatggctattttcaaacattcatgataatgccacgttgattttccttgactttctaggagttcatatgactggcaccggaagatgagtgcttctggtgtcaccaggctcttcatttagaccctgggaggtctaaagtggaatcccacagtattattgatgtgcatttcctatgcactaaagaggttaggagtcttttgtgtgatcattggcatgcactatttctttagtgaaacatccaagctttgaaagcagtttttggactccctttttctcatttatttttcagagggttttttttgttagttttttcatattccagacattaatctttgctcatttatgagtgttctgaagacagggttgatttggacagatgaagacacattctggctgtgtcaagggcatcccagatgaagtgcacattggggacagaaagctcaggaagacagtgggtttggtaaacagtgaggcagtaatggactagagattaattcagacaggcgtgtgtgctttattttcaggtgagccagagggaatacattttaactaattatcaattccagacctctggcctcacactaatccatcctctagcataggtaaataataataggtcacttttctcagagtgccctgtaaataaaatgtgcctgtaaacacagaatgggcaacagtgatgctgtctacacctgtttctgatgtctataccctatttcccatcctcaacctgggagtactatgtaccaactttactttggaggggagaggttctcttgacttaactcggtgcccccaggcaattacttgattcttccaagtactgaacctttttcccattgagtgagctccccacctagccccctaaccatgcaatcagggagaacctgcctttctaactttgaagatgaagggagggtacacaaactaaggaatgtgggttctccacccaccccaatctcttagagcaaatacagctccggttacacttcagtttgatctcatgagactcatttcagcattaaaaacaaaaatacacaaattctcatctagcccagataggccttgaactcaatagtctctgaggatagccttgaacacttgaccctccttcttccacctcccaagtgctgctgggattgtaggcaagcagcactgcaccctgctctcattttacctacaaatctgtaagttaattactttgtattgtttatgcaaaaaaatcaaaaatcaaaacaaaaattttgttgcagtttgcaagagtaacaacagaaagataacatgctacaataagggggatatttgaattcaaaaattcaaaagcaacagtaagttttgtcattttagctaccttcggagaagaaagagacttgaaaaatttaaaatcgtgttgcacttcaaagggcttgggaggtgtgcgtttgaaaagcaaagacattgagctcatttttttccatctgcatacaaaaatacaacaaaaaagtcaagaacatagctataacttgcgttccttgccaagtgagcgaatttccattgtgccattgcatccttcccctctgcttcccacaatgcctgactctcatggcaccagtcccaatgacactgactctctacctaattcgcattccattttgcttcctagatctccctccggggaaactgcagcaatttcaactctgccagaattgtctatgtaatttaaatcaccaattgtcatttgggggagccctacatagtagggatgggggaaagtcttacaaattcaaggcttgacttttgacttttaacctcgggaagcttcctctacagttaaaacttatttacatatgtatttagaaagtaatagctaagcattaaaaacaatatatatctatatatctatatttatctatatctatcatctctagctctatatccatatttctatctatatataaaatcttgagatgggatcattctagggtcagagagatgtctcagtaggtgaagatgccaaccctgatgatctgagtttgattcccgggatgcacaaggtggaaggagagaactgactattgtctgttgtcctctgacatccacagacttgctgtgacatgcactatctattcctccccaagcaaatgaacaaataaacaaacaaatgtaatgtaatggagtcattctgtggaacaaggcttaatttgctatacagagcaaataataacacaatgtaagcccatatcatacatttgcattacccaagcgatgatgaccctgtggtgctttggtatctactatttaggcctgtgcttgtaatagtcactaccaattttccagaactattttttgagtgcctcttgggtgctagcactgcgctaagaacagaggacacaaagatgcataaacaagaccactgtccttaaaggactcatgagtaaggaagactcacagtcacacactagaacaccaatccgaggtattaaggtacatgatagttaatattgtcagctccacagctgggactatatcatatcatggtcttgagttacttgatgcctctgctgacacaaatgcctttttgttctttggtattgtccattggctattaagaattatgtgttctcaggactactgcacaaatttatacttttatttacatagtcctcccttctgtggggcttcaaaattatgaaaagttttgatgttgaattccccattcctccgcagtgccaccacgcagtaataattcaattcttgtcttttcatttaaagaaaactaaatgttctcacctttcacggtcaaatatcagaggatattcatattgttgcttcttctctgtgaacttggtttcttcttttatctctacgggatattcattaacatcacaaggcaaaatgaaatcacttgtttgggataaatcaaacattctgcgttgtccgaaatagccacagtaatgcccactggtggagtgccagagcctgaagggaagagtcaaggaaggaagggaaagtgactggggtggtcagaagaaatgagcttgatcacaggtcataggtcacatggactgccttggtctaccaaggattttaaagttcattcaggactcttccccctaaatgttgtggaactatcattatgtaaacctttattttttaaattagggcttcaagcataccaggtaagcattctgtcacaggattacacccctaacccttaatgtaaatatttgtttgtttgtttttcaagacagggcttctctgtgtactttgtagaccaggctagtctctaactcacagagatccacctgcctctgtcttcccagtgctgggattaaaggcatgcaccaccaatgcccggcttaatgtaaacatttttatcagtcagcactctaacctgtaactttttaggcattctctccaaacaaactcgctaacacaagctgatcagaacccacctgagaatctgttagctaaagtaggtctgaacaatgggctatgtttcatctgtctgcttagaaatcatcaccaacatagaactcatgagaagagagatctggttccaaccacaattcctgctctctaatgttcacaagtgagtggtgaggaagaatgataaagtaaattcttctttacccgtttgtattatttccatatccattgaccccaagaagctcctccaattttcccaggggacttaaactaatatagaataaataccattaacaggaatttgtgctctttatcttacagagagatgttttgtgtctttgttttagtttagttttttttttctttttctttttcttttttcttttttttcttttttttttttgagagcaggtctcactgtgtagcctagcttagctatccagagatttacaggaagtttctggctagacaagggtatataataaaatactgtttttgtctcagcctctccggttctgggattacagacatctgtttatgtcttggtttcaatcctaaccatgggttctgttgcaatgactgagaaggagcataacctaaagggactaagagtagattccacacaattcagtgtgggaagcagccagtgagggaaggcagaaggagaggtaaccagttgagatgcctcatacttgacactgtctgaggatttaacactggagtcttacatgcctcctatattttaatttagagcattactgaagtaacatggccttcccagagctgttaccaggaaggaaatagagttattaagagcatttataacaagccctttaaacagaaaagcaaggaggctaagaggctaaatgaattctgctccaggcccacactaaagcaacttcatttcctgcttcagtgtttcctattcctcgtggctctgtcccaaatgaatagcccacctgacatcctgggccttagacatgggccctgagccatgtgatggggtttccaatttcctgccctgtgccccagacttaagtctcaattatgttttttctccactgaaaagtcataatcttttcataaacaagatttagaatgttagatggagtacctgcctcttgagaatgtggcagcatatattagccaaaggatgtggcttagttacaaaggcagcagtgctttgagacagctattaatagagacatgctctatgtattgagtatctggggagcgttccacttaaaggaatcataaaaataatttctccgggccaaggacaagtggcttgaacagtgcattagtctaaatgtctgtgtccccacaaagtcatgttgaaccctaattcctaataggatgggcatgagataaagtctttatgaagtgtttaggtcatgaagagtccacctacataaatagaattgtgcccgccttagtctgttttctttctagagctgactgcatgctgtattgagactgagaagttcaaagatggttggtcatgtagggtgatgtcctccatgctagaaggggctctctattgagttccaaagctgctcagagcattataggacaagacaaattatcattactcatgcctttcatcctttaaaaattcttatgtttattgatttagtgtgtgtgtgtgtgtgtgtgtgtgtgtgtgtgtgtgtgtgtgtgtatgtgtgtgtgtgtgtaggttagaggacaagttgtgggaattggtttcctctctaacatgtaggcttccaagaccaaactcagatcatcaggcttagcagcaagtgcctttatcctgtaatccatcttgctagctgtctccttatttatttatttatttatttatttatttatttatttattttatgagccacagtctcatagcatcagttccctgtcttcagcctcatttaaccttggttacatcctaggaatcttaacctccaaatatcacagtcaaattaagtttctaccttcttaatggctcacatgagtgattaaatttgaacaggagttttagaggaaacagttaaattatagtggtgtccctaacaaaggagttctggtggagctgtttcaccttttcattgtgtcatgatttagttacagaatgtccccaagggctaatgcattggacacttggtctccagctgtttggcgctgaagagttgattgagatcatgtaggtgctgaccttaactggttgatgagttcccagttaagcaggtattaaggaagtggggtttggttgcactggtcactgcgacatgcctttgaaagtcatgtcattgctcctctgtgtgtgtgtgcttcgcagcctccatgaagtgaacagctttcttccaccatgcccctctatcagtaggttctgtctcactgcaggcctagaaacaaggaagccatgccactgaggactgaaggctctgatgctctgagcccgataacacaccctcgtgggaccctgatatggctagaggagaaaggcactcgttgctcaagtttgatagcatgagtctgatcctctaaacccacagaaaaatggaaggagagaactggttccatgaggttgtcctttgacctccacatgtgtgccatggcacatgtgtgcacccctatgacacatgctcgaacatgctggagtgcgcgcgcgcacgcgcgcgcgcacacacacacacacacacacacacacacacacacacacacacacacacacaactagcttaaaaccttccacctttaagttaatttgatcaagtgtcttgtctcgatgatggaaagccaatgttcatacactatgttaggagttaggcaggtgacatttataaagcagagaacaaacactaactgtgccatctgctgatacatgaccttggacatttcagtctccagaaccatgagtaacaaatttcttttgcttgtaaacaacccattttaaagggcttgttatagcagcctaaagagactggggaaagagggcaatgctcatagcttatatacctgtgtggttggtgtgtgtacctgtgcacacacactcacacgcacaactgcacgcactacagctttcagcaaacatttctgttgatgggtagctgaaaacaaccccaatgaaagaccacaaagccaagttattaatggcctttatgacaatacatttttttcctacaaataaaacaactggttgtttttttctgacacaagaaatggctctatccatttgcctctcctacagaatcatcttgatcttgatatttctaaaaagttcccttaatatttccatattgtagttttatagtgacttctatctggaatggcattagggttactctgggctgtacatggcaggtcccattctctacatttatctctcacttcctcctttagtcaaagctcaagttatcttgatttgacctgccatgtggctttcaatcttaaaccacttgtttctagtctacaaccctctatttttaaaggtaaatgaacaaatccacagcaatgcctaggtactacatagctgtgtcccaaccaacccatagccctcaagtccagatctgttacccaggatctgttgaattttaattcaaagacattgataagagtataaaacattccttctttttcatttgtttttcgattggtttcggattcaaccaaagtctctctagatcactaatattgtctaactccattctttcaagagcataattcattgccgtggttttcaaacatttcaagtaggcagcagtttgtctccagaaatgtcatggcatttcctttctctttctttatatatgtgtatgtatttttagtatttgtattttgggtacatgtgcttagcattgattacaattaattagttaagttcaagtaagtaggctatgaaaaaatcaatcacactaaaatagttaggctcctcccatctctcactattgggtaactttttgtttgggtgtgtctctcttgcccttctactcttgtttctttttctgcttccttctccttcctttcccttcttcctttattcttccctccatttcctgccctcctcacctgtcctctcccctctctttgctttgttctttatccttttttcttcttcttctctctctcctttcctttctgccttcctccctcccttccttccctccctacttctgtcctgtcttatccttcatttctttttcccctctccttctttttcccctttttcctccctctcctgctcccttcattcattcgtcttcctcctccctaccctttcttctctctttctgacaaggcttcccaatctggcctaaaattcctgagcctaagagaacctcctgcctctttatcctccacagaactagagcccctggtatgccccactccacctagctacacactctttccaatgactatcttttttctgtggccttcctcagatatgattctagttctctgagctgtctatctgttctctgaaataaccctcaagtctactgcaaatatttatcataacttttaaaaaagcaatatttcttaatgagtctgtgaaagaagcaaacacaacaaaaaatgattctgaggcccatgtctctgccccctttgtccatagaggaatgtatcaactgatttccctagatatagaaaaagaattcaagtcagtgatggttttcccaaagattctttgtatattttttttagtttacttataaatttattctgtttaagtactgcacactaactgattgtgccactggagctcctaaatttattctaataagtgtaccatcactatgctttccctgaaatcccatgaaggggtgaaccatttatggagatgctgtgtactaggttcacacatggactaggtggagcaagttccaatcccatctttcagatcccaaatctattaaatatattgtcctcagatagaaaatgtatcagatattaagctgataaaattagatacacatttgatcttagccaaatggtcaggaagtgatccaaagcactgcattgaaaccaaacacatcaatttagcatcaaatcttagtggtctcatttctcaccccccctgccactcccccacccccccacccccccccccgccaccaccccgagcgcccttcggagttcccaggatggacccatttgggttacctcactgagccatcaatggaggcagtaagcaccagctgcttgtcttccacatagatcacttgaataatttctaaggaatgggcacgccaggaaagcagctgcttgaatttctagatggcaacaagacatagctcttggagtgaatcagaatacagtcttaagcaaaaatcattcctcattgaagagctgcatttatgagtgggtaggatagatggtgactgagtctctgctctgattagcttttctcctgctcaccgaggtttggggacatttctgttttagaacattattactctgcacatacccctgctggagaaagcagctcatatttttattaatttgctgtgaacttcactggatggttggtagctgtgggagacacagtgaagaccatcaggagagacggaaagtagatccagaaggtgaaggccaggagacctttctccttgcaaactgtatctagagaaaatattaactatgttctttgcatggggtatgcagtaagagacatctgatgtaaggaattggcaaaaagaataggtaaagctttctctctttcaaaagcagtgtgagagtcaatgaatccacctaaagaagcccaaccttcattaacatctgtcctcaagttcggagtctaagggacttcagaaggcattcctacagtttgttctgcagtaatatactctgtatgtaacacactctctacttactgatggacacactaagaccgcatttcccctgggccatctactcagggtgatctgtgtgatcaaagtcctaggaagctggcagttctcctgcatatctcctattccttgagacttgagtagggttaaaaataatttcttctgagtttctatgactggtgactcagtttcctgtgtctattctttgaaaggcaggctaaaagtctgcactctcctacttcatattgtgtcagagctttcaagagcatttggtcatccaaggattctttctctgtcttaagacagcatccatccaagcaaaggctggggtcatgtagcttaaattgcagtagaatatgtacctggagtggagagggcagcttgcatttccatcaattgtgtgtgtactttaggaaaatgttcaacaaacatgagctggtttctgtaagtggaaaactaaatttcataccttttcatcatgaggtgcatccaagaaggaactaatactgcaaaggataacatgtccttctgtataaaaattaaacattgtagtccttaattagatattatattttttatgcaaacactctccataatgacaagtcattttgattcaggcacttatattagtagatagaatagaatctgagaaataagatataaaagaggaaatttgtagtctggggatatagtgtggaaggaggcttgtctaatttgtccatcatgtggaaatcccgggcttgatccccagcactgcataaaactgggtgtggtggtacattggatgtaaccctagttctcaggaggtagaggtacaataaccagaagtacaaggtcatccttggttatacggcaagtttgatgccatcttgggctccatgaaatcctatctcaaaaaaaaaaaaacaccaggaagaatgaatagcaataccaactcagattgttccataaaagaaggggaaggaacacttccaaggtcttttaataagccaggattaccttgataccaaaactgataaaaattcaacaaaaaagagaattttaggccaattcccttgatgaacacagataaaaaatttcttgaaaaaaataaaaccttgcaaactgaattcaagaacacatatcaagttggctctatttcagggaagcattgatggttcaatggaaataagtaatgaacaaaatgggacaatataaatggacagaaatcatatgattatttaaattgatgcagaaaaggctatctagaaaatacagcatccctttaagatacaatccctggagagacttgggatggagatcatatctcaacagaataaaagctagtgcataaaaaactagtagtcaccatgatgataaatgaagaaaaactcaaagcattcccacaaagatcaaaaagataagggtgtccactttacccatttctatccaatacagtgcttgaagtcctagctaaagcagtaaaataagagaagaaaatcaaaggactatgaatagcaaagtaagtcagattattcctctttacaaatggtatgatattatacaaaagagacccccaagattccatcagaaaacgtctagaatttgagaagaaattatctgtaggctggccacagtggcacacacctttattaccagtactcagaaggcagaggcaggcaattttctatgaattgaagggcagccaggtctacatagcaagttccaagacaaccaaagttacatagaaagaccctgtctcaaaagacaaacaaaaaagatcctttggatgggggatagagctttggatcctgccctgaggtaggggcatgcagccatttggcattagctgataccctggggcatgtcaggtaccagtctgcagcagtgtccaatctcaatcctggagtctcagcctccaggaggcccagcagagtctcagcatctaagctgagttctgaggctgtaaggtgaaagacaaaatgatgggtcatttacctgtattcaggccctgtaagacttgtaaggaggacacatgccacaaacataaaaggttgggtctgagctggcagataaccatgctgcattgtgttctcagatgtcaaactttctcacttggagactttcatttgtccccacaaatgtcacacgtgtttctcagagccatttttaaatcacataaatccttaagatgcagcttaatccgtcagaaaaaggacttacccacatttccagccagcagtgtcctgcagcagaagtcagtgtacagtgacgtcagagaaatggctgagtgcttcgtgaagggcaatatgtctttcagaagcttcccctgaacaaaggacaaggcaaacaacacttctacaataaactctataagatcgcaatattaaagttgaatttcactctacctgagacaggattttctatcctgtactgaaaataacttgacactctccatgaggacttattactttgaaatgaatggtatggataactctaagcatggatgactattagctgactaatgagttcctatttctttggtgttaccttttcccacaatttcttccatgggatttcaactatatggtctcctcttacacaggcattcccatcagagtcaaatgtaactcaatggttacaaggcatatttcaacaggcatatttacctgccaggaaaacatatttctgattattggggcaataatggattgtaattattttgagtggtataggctagcccttggaaggactttcatatatgttgtctcactggacactgagaatagaatttgagtcagtagctgttttctaagactttactcagatatcatctgttctgtttctctctgtcttttttaaattcgtcacagataaaacaacattttattccaagatcatcttggaggcagtttatgttttcaaaccgggggtttcattatgaagtcagaacccatgggcagactagggctgagctggcagatagctttgctgcttcaagttttcagagttcagtgtgggtcatacaatgctgttgctgcctttggattttctgtagaagaaacccttatcacaacactcacaccttcttgtgtgtacaagagcttcagggccacagtgggcaatcgactcacaactcctgtatcctcttctgctcccttaaggcctcctactttgaattctttttttaaaaataaacgtgtgtgtgtgtgtgtgtgtgtgtgtgtgtgtgtgtgtgtgtgtgtgttgtgttgtgtgtgtgtgtgtgtgtgtgtgtgtgtgtgtgtgttgtgttgtgtgtgtgtgtgtgtgtgtgtgtgtgtgtgtgtgtgtgtgtgtgtgtgttgggatgcatgtgtggagatcagaggacaattttgtggagctggttctctccttccacctatacatgggatttctaggagcttgtgtggcaactgatttttacccagcgagccatcctgatggtccctaatttgtacttttaatttgggatgcccaccctccatcaaaaaaaaaaaaaaaaaaacacttgaaaatctcctggtgaattaaaactactgttttcacagtaaaagatttaagaacattcaatgtgatgcaaataccatctttcaataatttatatcattaaagttttatattagggatcaggcagtgaaggggcttgctgccaagcctgacaacctaaatttgatccctgggagctatatggtggcaaagtgactctcacaagtttccttctaatttttttcattactgtgatggcatgtatccacccacatacacacacagacatacataaacgtacacacagatacataaatataatgaaaaagtactttttatgctatgcataaatattcttatattctgttttatggcatgaaaatatgaatgtattgtgtgtgtgtgtgtgtgtgtgtgtgtgtgtgtgtgtgtgtaggtcagggaacaattgggtgtcattcttcaggaacaccattcatcttattttgggaaaagctcacccctggcctgcagcttgccagctaggctaggatggctggccagcaagccccagggatatgctgacccattctttccaggactgggattataagagagctctaccagactcaggtttttaatgtggaactagaagttgaactcagttcttcagtgccttattggctaaacccatctccctagccccttacaaccttttatgtaatacatttgatagcattgatttaaatatccagtgaaatattaccatgaatttacagcgcagcttgaaagatctgaccctctcagcagttctgatgatctaatgtcttgagtagtaaaactggcctagtgtatagtttggcagtagagagtgagtgaactgaaaggccatctgtttggttagaatagtggaatgtctgaattgggtgccaggtggaagaagtcgcaatgcatgactgtcctctttatcatcccattccttttgagccccagccaagaccaaactccatcacctccagcgtccacaggcggaggtgtccatcctcatgagcagtgaccaggataggaggctgtgcttccaatgagctaccgaacatggcctgttttctgctcgctgtatgctgctctcccatgtctgtttgctcacctggtagagaaactcatgagctctcttggtatttgtaatccttggggtttcaagttttatgggacaccaaagaagagatggatgggaaaagagaaacacagaattttctcattttttccccttaaactcaagagaattcacaaggaagaaaacagaaaagcatttggagaatggaatactggatcactggaaaaatctaaaaggcatatttgggctcctaacgtaaaagcctctagaagattctgcacgtggtggctgaaccttgggaaagttttaaaacatctatgttttataaatctagcataagttttagcaaaatgcattggagactaaaaaggtcagtaatacttaagattttaaaaacctagaattagcataaaatgcattgtttttgttcatgttgacaatgtttctggacatgccatccttttaaaattggcatgtattaactaccaataataacaggtttcattatgacaatctcactcatgtatagcatatgtattaatcatatttactctgtattactctttctcatcccctctcactctcattgagcccctcaaagggcatcattttaatattcttcccactaggccaaccttcagggggtcacatatcagatatcctgcataccaaatatttacattatacttcataacagtcacaaaattacagttatgaagtagcaacaaaatcattttatggttggggggtcaccacaccatgaggaactgtattaaagggatgtggcattaggaaggttaagaaccactgcattagactgcctagacctccaaacccttcaagattcagttacagaaagagcacatcaggaatattctatcacacaaagtccctgttgcaaaggagctgctctggactgtagctccatggcagcatgcttgcccagcatttgtgaggtcccaggcttgatcccctgtgtcacaaaggaaagaaaagactcagtggcttgattctaagggagagagctgatactgacctttgaattcggtgtcatgtatacttagtctacttccctgaatggagaagagagagaaaacgtttctgtgacattgcaagggggtgagacctactagatcgtcagcttctgcagagctgagttgacattcctaaatactaatgttaaaagtcatttcacaattatttctttgaaatactgtattgcagagattttcatagtcaaacagaagagctataaaacaatggcatttcctggtgacttgctctagtgacagtgactaggcccctaaatcttggtgtgtatttgtctctaattctactgacagccacaccaggtatctttattcccccattaaattcccataaggggacagaaactcagctttagggacaggacagtgtatagagggctaggatttaggcgcggctctacctagcttttctatctatctgtgttgttgtctttctgccacactagttctttcaaaataacttttgtgtgaaaatctgacttagtaaaattctgattagaaaagcactcagcaaaaatatgtaaaattggaactcagaagacagaagaccactgcattgcattatgggctgtgatctaattacaccatatgtgaaatatgataacagagaagagaagctcaaaatcactgggtcattttacaagcataagacaataggaataacttattaaaacacttatttattaatggtcttgtgttggttgttgacgtatgggaagaccttgaaagtaagtgaagaaaaaacaatgcagtcattgattttcaaggaaaacaaagatttcacatgtacacaaagatgtacaacaagaaccactatttctgaggcactgcttgtaacaggaggatgctgtgtctaccttgcacttaccttgctactctgcggacccttgcttgagtcacattgggttgatgagcagatagaatcctgacttgatctcctgtgcagggacgggggagacacaggatgcaaggttcagaaaacccatagaactcagagtgtcctgtgtttcaggttcaggtggttatttggtcctcatccctgggagtatcccactcactcattaaccagccacaccctaaatcccatgggatggctgctcactagagtggtgttataggagagtgctgaggagcctcagtactgaaggggtattgctgctgcctgggtctggtgaggctgtcccattattaacaccagattgggccactgaggttcagaaactgaaatgcagcaggtgaagacaaaactggctaactccttgcactgtggtttttgttgttttttctttgtttgttttgttttatttcttctggtctgatccttcttcttctatgctttgtggccaggggctgaaaagtagtttatatatagagaacaggctctgataatattcttcaaagagttttgatgatattttaagatatatagggaaggtgctaaattctgactcaccaacaagtgagccctaactatagcacagaaacctttcatttctctctagatatttgtttaacattgttgcttaaaaatatagactcctaaagcaaatataagtagaaaacagaaaaaaaaatactttttattagaaagttaacaagcaatgccctgctcttgaaagagtggatggagattgcccagttatactagatagtatatgaaatctgcaatgctttttccagttattccctcctagacctaaattggctgcacatctgtggtggttgggttaggtttagctaaaagtaagatccagtgagcatggtaagggtctatacagtgagatgacatggtgtctacacaatgtggctgacacgcaaagggtccacacactggttttttccttcagctcaacatccattttccttcagctgactcctactcattctgggatatggatagctcatgccaccctacctgggttccagatagcactactggaccacgaagttctgagttaccttacacagtcaggaggtcggaagaggaacattatatcgttaatccgaaagcgtttgggatccaactcagggtctgtggagaagcagtcctcaggccggtatctgaaaacaagcatgcccttgcctagtgaacagcatgaactatgaaacttgcctcatacttcatcaatcccatgcagatatagtgacttaaaatgttaccactgcacatgaagtgaaaacctggggaagggggtagttcaggtataccttgtttattaaagctttgtggatcatgtgatcatcagatgatctacaagtctttaatccaattaactggacagatttcctacctataggtcagagtgtctcagcctgtagaggaaccacctggaagttcctgacagtttaaacaacagaattctactctgaacataaggaaggagggacttgagtgacatgtggtgcctaaccataggatttaaaaccaagtggacaacagcagataatccagagattactctgctcccactgctctagtcatccatggacccagatcccatgggacttcccaggtagtgtctttggaacagaacaatagtctctagccacctacactacactctgttgtatctctgtcactttgcatccctgagggcaaactaacctcttagcaacatgcctctttcctttaagggaaattacatctgctaatttgaactgatgagtgattgctaaaatttggatctggaacatccttcaaggacccatattgtaaaggcttgctccccaggtcagtgcccttggaaggtgttgagcttttaaggggtgggcaatagtgggaagttttcttgtcctttgggaagcagatccttgagagagatcaggcacccatttctttctttattcactttctcactataagatgctccatcactcattcctactctgatctgatgtcttctcacaggcccaaagcaaacagcgtcaactgatcacttgaacctgtgtaaccaagagtcaaaacaaatctttcttctaactgccttagggatgtgttacagtagcagaaaggagaatgacacaatagtgtgggagtcttgaatggatgggaccaagatcaaaaaagaagcttgtgaacggatggctcctttagctccacacttttagatatatttgatcatcaatcaatcatgaaatagatgttcaattagcaagaaactctattaagcttgaacctccaaatcatgatgttcttgagagagaagcattctttctctttgactggtgaaggagtcagacaaaatgaggtatattaagaactggcaggttgactgggccaaactcccggaatccagttgtagagagggaggagtgatgagcaaagggttcaaggccaggctgaggaaacccacagaaacagctgacctgaacaagggagagctcatggtccccagactgacagctagggaaccaacccaggacccctgaaagtgggtgtcagttaggaggcctgggaagtctatagggcctctggtagtggaacagtatttatctctagtgtacaaatggactttgggagcccattccacatagagggatactctctcagcttagacacatgaggtagggcctaggcccggctccaaatgatgtgacagactgagatgatcctccatgaaaggcctcaccctccctggggagcagaagggggatgggatgggaggttagtagggggtatggaagggagagggaatggggattgatatgcaaaataagattgtttctaatttaaataaaagatattcaccaaaaaagaaaagaaaagagaagaaatggcaggttggaggaacaatggttaagagcactggctgttcttatggtggacctgggttcaactcccagcacacacatggcagctcacaactgtccataattctagtttcaggggatctgacatggtcttctggcctctgtaggcactagacgcacagttggtgcacatgcagacaaaacatccacacatataaaattaattaataaataaaatagtggaaatagcccaatcataaatataggaataatgttcagctttataaccagtaaagctgggactatattacacagttctgggataagctgtgtctttctttcccaaaagactccagtgattgagtctaaatgaaaaatattctgtgtgtatgtgtgtatgtagatgtgtagtggccaaataacaaactctgtgttgttcccccggcacaggacccattgtttatgagacagtatctctcactggcctagaatttgtcaagtaggcttggctggctggtagccagcaagccccagggatctatttgtccctatatcaccagtgctggggttataagtatgtgtcagaacacctgtcttttcacacttaagttcagggataaaattctggttcttgtgtttgcagtgcaagtcctttcttcactgaactatctcccaggaccctactgttctaaaatagtcacctacctatagaaaagagacacaatgtataacctaccatagttgctctcttttattgagtactaaatttgcacgcatcccttggcaaaataaaatgcctggttcttaagcaagaaggattgctaccttgaaattggaatagctcagaacagctgccccctcttttcacggtggcatcagcactgatcatttttaatctgtcttcttttccttttcagtggtgagtcagacaaaagttacaccttcagtgtgaggattgttaataagattgtgaggaattgtccaatgtgtgtagactaggtatcaaatgactagcatacagtacacggacaggcactgagtgtttgatggggccaatttttgatgagaagggctatgatccaggcagaccagtagtagataatgccctctaactagacatagagatttcttatatgctttcttctctccccctttctctcccccaaaatatccctttcttttcgattctactcccctcttctctaagctaaacttgattttatattttgtatctgcaaataattttataagtcctcttgatagagggtgtccatacaaggtccaagtacacaagtggagacggtctattatttacagtttagtcatatagataatacattatgttaggtcctttaaaccaatggcaggaacacttagagatggctaactggggagtaaacactccagtcatgatccagagtatttcagcagaattggttggaatccaggatgcacctgtgacattggcccttgctagagtcatcatggtagtaaattggataggctgacgtgaaggagaaggaaaagccttctgggatgccttctagaatgttgtctttgataagtgcatagacattgatggcactaggaatacagtgggaggaaaagcttgatggaagggcaggtcaggaattgtgaagcttgacatgaaaggggaagagatcagataggaaatgctactggatgactggatatgtatacttgaaagcttgtggacattagtatgtcaagttgttatacattttaaatatttttggggttagagagatggctcagtggttaagagtactggctgctcttctacaagacccaggttcgatttcatgtatccataggatgactcacaactgttagtgccaccagcattaggggattcagtgtcttcttctggcccctgccaccatcaggcaaaatatccatatacatacaaataaataaaatttaaaaaataaaattaaaaccatttgttgaagccataaacttaaaatcggaaagatcatatatttacgtaaaggagaaatcttttgggtatacaaatatttaaggctttttgtgcaatttagggatttagactctcagaacatatgaacatagcctccagggaaatccttccttggaggtattacttgctatttagactcttaagaagtaaaactcatagtatttggggccaagatgacacttacatttctttgacagtagctgttacaaaattccataagataatcatgccattcaaggttccacaagctatcaaattgtaaccctccgtttgaaacagatcaatgcagttcacgtcaacatcaacggcaggattctaaagaaaaatgacacagatgtagattggtgggaatacaaagtcagcctaattcaaatgctatacttgcacattataattgtaatccactgaaagcagtttcatagtatgttcaaagtcattgagcatgacatttactacatccttgtctttagcattagaaaatttaccttggagaactcattgacacaacaaacatattctcttctcttctggcccattttgacttagtcctgacttaccctgctttaccaacactagactacttctatttcttttttatcttcccttcaatgcttttgaaaaaaaaaaaaacagtctacatttgctgtttccactaacatgctagtctcacacttgaaaagtccatctgtcccagcttctgatgtcgtagaactttatagaagtctttgctatgaactgccagttagttacacatgtttttttgcagttatcttgccttgggtatttgtttatcatcttatgttcttggaatgcagaattaaatatggtatctgtgatctgagatacgtatgacattttaaagtatctaaatgaagtgttaattactgaatgatctcaaaatgctgtattggggcatgtctaagacttgtgtagcaagcactttaatccatttaatcatacctccagaccccccttacattgtactttactaatatatcatctaatttaaagtgatcagttttcaattctttgtcacctgtgcaattacttcactactgctttgcttccaaagcactgcacactcatctttctgctgttattggctatatacaatgtttcatacagtgtatacctaggtctaaacctagttccaatgacaaacagagttagaggaggtaggctagaattcctctccaaagtgttgagaatcatgtgtattaatttcaaagccctttctttaatctaacaatataaccctctattgaagctaccaatgcaattcaagttcagtcagtactatgctgacatttgcttcaatatgagaaaaataatatcttttccatattaaaatgatccaatagagagttttcaaattctataggacaagcctcataattttctcgggaattacatgatagttatttcactagtgacaagggagatcctgaaggcttcttttgcttggtccttgtataatcttcagccttcttgtaggctttggcatctgaccatttgtccttgaaaaagctgagacgctgaggtatgtcaagctaacagtatagtcataaagttaatgaaaacacatttaaaacaatgaaaggcctaaatgtttttaaagaacaaacaagatgacatcttccttccttatttccctttttttcatcctcaaccaaactccctgaatacttcctcctcagatatatgtgcctgcaagcatgtcacagaaataacttgctgaagagaaggtgtctacttcaatatatacagatgcttctgaaatataaggaaaactggaactctggtttgaagaccgaatgcattatagtattaaaagtttttgtaattttatatttgacatgcccatattttcataataaacatgtctataaaacaacaacgttattgccatttttgaaagaattattgttcagaaatatatactgaaacagttaaggatgaaaagatgctatgttgtagtaaaaatggcaatcttgccaaaagcaatctacagattcaatgcaatccccatcaaaatcccaacacaattcttcactgaccttgaaagaacaattctcaactttatatggagaaacaaaagacccaggatagccaaaacaaccctgtacaatagaggaacttctggaggcatcaccatccctgacttcaagctctattacagagctatagtcctgaaaacagcttggtattgagacaaaaatagacaggtagaccaatggaatagagttgaaaaccctgatattaacctacacacctacgaacacctgatttttgacaaacaatccaaatatatatgctggaacaaagagaacatcttcaacaaatgttgctggcataactggatgcaaacatgtagaagactacagatagacccaagcatttcgccctgcacaaaacttaagtcaaaatggatcaaagaccttaacataaacccagccacactcaacttattagaagataaagtgggaattaattggtacaggagactgcttcctgaacataacaccagtagcacagacactgagatcaacaattaatttaagtgggacctcctgaaactgagaagcttctgtaatgcaacggacacagtcagcaagacaaaacgacagcccacagactgggaaaagatattcaccaaccccacatctgacagaggactgatctccaaaatatacaaagaactcaagaagctattctccaaaacaaacaatccaattaaaaaatggggtacagaactaaatagacaattctcaatagaggaatctaaaatggctgaaagacacataagaaagtgttcaacatccttagccatcagggaaatgcaaatcaaaacaactctgagataccatcttactcctgtcagaatggccaaaatcaaaaacaccaatgacagtttatgctggagaggatgtggagaaagaggaacactcctccactgctggtgggagtgccaacttgtacagccactttggaaatcagtatggtgactcaggaaaatgggaatgagtctaccacaagatccagcaattccactcctaggcatatacccaaaagaagcacattcatacaacaaagacatctgttcaacaatgttcatagcagcactatctgtaatagccagaaactggaagcagcctagatgcccctcaaccaaaaatggatggagaaaatgtggtacatttacacaatggagtactactcagcagaaaaaaaaaaaaaaaacaacagaatcttgaaatttgcaggaaaatggatggaactagaagaaaccattctgagggaggcaacccaatcacaaaaagacaaacatgatatgtactcactcatatgtggattttagacatagaataagggattaccatcctacaatccacactgccagagaaactagtaaacaaagaagaccctaaaagagacaaactttgtcccttggagaaggggaaagggtcaccatcccctgagcaaattgagaacatgggaagaggggggaggaagctatgagagtgagaagggaagaaaaggaaggatgcagaggtcatgaggaagcagaaattttgagtcaggtgtagattagaagaaaggacatatatagttaggattttagttggggggtggtagaggagggagggagggagaagggaactgggatcgtcatgtaattcaatcttgtttgtaattcaaatatataaaaaataaaaaaataaaaacatatgccacaagaacaaaaaagaaaagatgccatgttgaagctccacttcaaaatgcatagatagcaaatgtggggaagtgctatgaagaacaacaaccaaaaaaaaaaaaaaaactggccataaacaaaacaaatctaatgcctagaagttgactgtactattttctgtatttgtttttggagggggggtgttttgttttgtttagttttgttttgtttgagacagggtttctcagtagctatggagccagtcccagctctgtaaaccaggttggccttgaactcacagagattcacctgcctccagagtgctgggattaaaggtgtgtgtcaccaccacccagcaaggaattcaacttttaaggtaactccacagggaaaacaaaacaaaacaaaaaaacatgcatggctggtgagtcctttggccctgggtgttgaatctattactgttactgagttaaagagagataatatcaaactgtcctctaaatccaaatttcttcacatgtagattagtgcagccctcagacttcatcagcaaagtttctttatgcagtggaggacgcttaagacagaaaacttacaagtcaaactgctcagccatctatctcacagcccctctccaaagcttgggagccattgtggaaaaggagagagaaagagtttaaggccaaaggtgaggaggaccagagtgaaagtatcttctggacatgacagtaccatcgcacacacagcagctgctgttgtctgagcgagatcacaatctccactctaaacgggagagggagtggctcccaagccctcacccctaactaaggattaatggacagttgggggggttcagggaagtgggagaatcaattttctttaagggtgtggctcctgataagtcaatcatgcttcaggagatggccccatacccagagctatatgaacaacacaaattgggagtctatggattatttttttttaaaaaaagactcaaagttaggggttagggaggtagggatggatctcagaggagtgaagaagaggagttggggtgaatatgatcaaaatatgttctatggaattctcagtggaaatatttttaaaaaagaaattgaacatacgttactagtttgttgagtaacacttttctggacaattaactcaacatccgggaaaggaatggccatcaacctttctttagttgacatcttcagatgtacaatatggctcccatactgtaggtaaggcatggcatcaggcagctcccatatcaccacgaggatgacatcatcttcttttcccttgtgcagaagaaatttagtaagtagaaaaataagagttcaatgaattatttcctttgagctggtcttaaatgaagcaaacacagagtggtaccccgtcatcctgcatcatcagctctcaagctgtgtctttccactcaaaacataattttgttcacaactcactctttatagtaaccagaaacccaaatctgataatagtcatggaagttttatcacacacacatgtacatgccttacgccatttctgtatctgttggttagctttatgtcaaattggcacaagctagagaagagtcctttgagaagaggggacttcattgagaaaatgcttccaccagagtagcctaggggcacacctgtagggcattttctttactgatgactgatgtgggaagacccaacccaccgtgagtggtgccagccctgggctggtggtcctgggtgctgtaagaaatcagctgagcaagtcagtcagcagctcccgtccaggccactgcatcagtttatgctttgacttcctgccctgacttccttcagcaatggactgcaggctgttaagatacaataaatcctttcttcctcaagttgttttttgtttttttttttttaaagtgttttaatcaaggcaatagaaagccttgctaagacaatatgatactgcctttctattttcatccattatttttttctattttcatgtgtatattatgcttgtatgtgtgcatgcacgtttgcatgtgtacatgtgtgtatgagcatgtgaaaccccaaggctaatatcaggattcatccttgattgctttacaccttatttactgagacagcatctctcaatcaaattcacacatgaaggagagatgggaggaatgcaccctatctttttatttgcttttatattatgatagcatattctatatagccctgctttctaaattgttatcattaacaatattgttaattttttacttttgtttgggcatagcagcccaaaattttcaggctggtccttttgttagcagaacagggatccttctagaatgaaaagtggctgtggttggacagagatgacttcttggggagtgaagagagtgggctgcatccctagttccatgtgatctaagtctggaaggttcctgttttctttggctttttgcttcaactagcctttgagttgtaggtgtggctctgaggcttctgtttttctcatctcatctttctatctctctctctgcctgtgtccatgtgtgtgaatgggaattctttggtcagcatttgtcaggttaagaaaattttcagtggtcaatcagtgagatttggggttccaacagagcaaagattcaaggctgttctttggccttggcttggatcctatggcctctcttgatataagtctccaagatcagcttttagttagctgtgaaaaattctgagggtgaaagaagcaatggagtcagtgatctgctttcaggatccccttcatggaaattctgatctgctttgcacagcacgttgctaactctgcaacatgaaacaggaagttttaaaaattcccaaatatccctcatatatttaccactgtattaagaaattaagaaatttcttaatagtttactctttcaacctctaatgagcagggccagaatacagatacaaaattagctgtttagttcttgcttagtctaatgttctacacagaggaccagaataaccaaagtggaagtgactagggcagaaccccaaacatttttggtatgtggtggtcccatgtgtcccagtctgacctagaactcactctgaagtcaaagatgaccttgaacttctgatctgcttccacttcccaagggcaaggattacatatgtgtgccaccacacccagtttatgtggtgctagttatcaaaggtagggctccgtgcatgcttaaggcaaacactctaccaacccagctgcagcccaagcccaggatcatggttcattttgtattccttcaagtttagtgggcatctatgattactgatattctgatgatcgattgcagcaacttccagaaggcaagtgacattgtgctctctgtgggctgccaaggcattcctctacagtcacattttggactatgcagacaacaggggaagaatctatcgactagggaaagtgttccctcctttctctcagctaaaaagattagtcatcccagttcatgttgtactccatccctgaaaccctattcgagacttattttctgatcctagcttccagaggagaacaaaggcaacgatactccttgaggtctagctggcagggtgagggccacagatccaggataaatgatgctggtggcttctttttaagtttgaagaaggcattagtattcctaggtggtaagagattcgcaggaaaaataaattagccaatctcaatcctcctcaaacagccctgaacagattgcaccattaaccttaaaataaacaaagtcattttggtgaggaatgaaaaaagtgaattgagcattttgaatgctttataggccataagggacagaatctgctggggagccctcttgaggagcagagagttattgccaaggtagggtgtaagcaatgttagcagtggtagatagatatgtgtcagttcaacctttctgacacccattttaggggaccctgaatgatgctgaagcaagaatgtgatgggtaggatgttggtccttggtagttgtgctttttgccatttgtttggacttggttggttatgagcatcacaggcaagttagttggtggataagtactatcctcaagtgactggcaagaggggagttgagtggggctggagatgtagctcagttggtagattacttgccgaatatgcttaaagccctagactcaactcccagtatcattgagtaagtgggtgtggtggtgtctgcactagggaggtggaggcaggaggagaatcaagagttccatgtcagcctggaatacccaaaaccgtaacatgagagagacagagatggagacatatacacatagacagaacacacacacacacacacacacacacacacacacacacacacacacacacacacacacaggcagaaagatacagagacagagatgggaacagataaagagaggtacatacacacagagaggcagagaaatgaagattactattgggtttccccaagaagaccatgtgtggagcaagtatggaagctggactcaaacctggatcatcttgatggtcccattacgctccaaggccaggacaaggtgctggtgcttcacctgggccttgagaaaaaacaggcgcagcagcccgtgttcctcctctacccagtctttcccttccggcagcatcttcatctcctgtccactgccaaagtcccatatcttaactgttcctgagggtgtgaagcaaaggctttgtgggcaaaatgttgtgcagacagcctggctttttagctcaggggacacaggcagctgggtttccccagtcttgctctacatggtttgccataggctgatcaaagaagtgagcagcacagggtaagtgtcttgagagcaatggacatctgctttggtttggataagtgttccccaaaggccggagtgaggaaagtttgctctccatcttggcactatgcttggaatctttgggaggcggggcctacaggtacccggatcatagatggagtcacttcatcttcatgtctactcattctatcaaccgtcttgtgaggaagcatttatttaacaaatctaccccagaagaaacacattctgggtagtgaatgcagtgaatggtcacactgtctactctagtgtaagcagctcttctgtagcagtcagaatgagatgaggtgggagggtggggcagtggatagctttttactcaagtccctgtttcttccctaagcctgccatccctctccaggactcagccctcagcactaacacttctggacaagcaatgattggacagtatgctcctctgccaggctagccccatcattcatttgctcactaccaacaccagatatcaatcatacccaggataccctgcagtggcaagaattacgtgagctcaggagaatcagccctgcctcttgctgcttactacatagccggggcagcattggagggctcactctggtgctgaggatgagaaagagctggtgggctgaccaaaccagcaaccacccagacccagaaccagagcgaagagttggcccattccatcagccaccccatctatgatctgctggtgcacgtgaaggggctggtcatgcagacccaaagttacagggtccccatgacacaggacaaaacaggatatccaagaggcaccccagcgagggctcagtattgatgatgtattaaaaaccagagacctcaaaccagaccgatgactcaatacaatgaacatgtactaaaagtactagacatttttatatggatgtaacaagtgcctgtggcagttgtcctctgcatgactctttagggaggaacactgtgcccctgtgtatcgcatgccaatgccttcccacaccttgaccctgcactcacgactgcatccctgctgtgttatcttctgttcacggtttcaaatatctgactttcacagggggtgcccactcattccatcaaccgggtcatgaggaagcatttatttatcaaatacactccagagtaaatagattccgcagagtgcacaccactggtcactctgtctactctagaacaagcagatcttttgtaggtgttcaaaataagacaaggtgggaaggtggggtggtgtgcagctctctagttcctacaagtgttccacagaggaagaaatacgaaacacagtcacatccaagccccaaagtgcccaagtttggtgtgcctccatagagcctaggcatagaagtatatccagtagagaaccctaggcattctgcaccaaagcaggatgggtattttgtatggtcatcaaagatactgtgagttaaatattgcagggcttgggagtgtagctcagaggtagagtctataagtacttcatatgaagccccaggttcaattctcagcaaacatacaagcgcgcgcgcgtacacacacacacacacacacacacacacacacacacacacacacggcaatagtagcactagcagtagcgtcggcagcaagagacccccaagtctaatgactgcctcttagcttaacagtacataaaaggcattgggattgaacaagtcagtgcaacacagctattttccaccaaaagttgaaatgcagtggtatacgtaaaagtcttttcattcttagctacagtgtaaagtggctttctctaatgtattgactcattgtaatgtaggtgatattccatgtgccagtgtaccagtggtcaataatgaaaggctttggtttgtgtttatgactatttttttaagttagtataccaagtagagggtttcattatggtattttcatatacaagcatcattatgtgaaagacttttgcacatagttgtatcaactgtataaacagaatgtaagttattggtttgtttatcacatcaatatccggacgtcagtggccatgaaataagactgttgatattcacccaggcatagccatttctctggaatgtctatatgtcagcctgatccacaattccttttaagccccctaaacttaggaattcctgcatgaattctcagaacaccaaagtggagatggcatatactgaacactagtctcaccattatatgctcctgtggtaaaaagatagccactttcatcaatagctgcacaggtaagttcaatattgaagccatgagggtctagaatctggtatatttggaggccactttcaagttcccatacctgttggagaacaaaaacaacggcaaaaaccaggtattccatatacctgcccttcatttttgagcaaagctttttaccattttcaaagttttcaaatcagtactccacacccagcaccttccccagcaccctgccctgtgtgtgggcttggtcaaagctgtgaaagttgacttctcttatcagggattgtgctatccctgagtgtgcctgctgagcaccaggtggccgaggcagtttctgctttaagagagcactcatgcagacactttagacagccgagggcatgctttagaagggggtactagacctcagcccctccctttcccctctcttacttcctgactactatgaggtgagaatgatattttatctcacattctaccacaatgcattgccctatcaaacatcccaaagtaactgggccaatccactatgcactgaaacctccaaaaccatgtcatgtaccaaagcaaatctcttttaagttgattatctcaggtgtttcgtcacagtaatggaaaaattacactactataagggtgaaacaaaggtggcagctggatagaagcacaataattaacagtactcaattaagtcctcagggacacgaagggtcatgggataaaagtatggcaaacagcataacatgtgggcaaatcctaaagaaagaactcactggtcattttaggcagttctctgaggcacagtgacagagaaagggttgtgtaagaatgagacagaccatctgtgaagcaggctggcagtattgggaaaagtccagaaacatcatggctcatcaatccctctcattggaaacacacagaggacagatccatagagctatgatctgcatctctcctactttgggaccgtgccaagttcaggtgtaaattttctagtcagtgagcaattgaagcagctgtcaacactagagctggtgggggtggggcagcacatccagggggtcagaggtagagaggtgtgcttgtctctcagggaatgaaagggaagttatggcagccacaggaaagagggagaggaatctgatgaaatggctcatggctgcatgatggccactgtctgggtagcagcagagaggcgtggttcacacaaagtaagtctggcccagagcccatgttctcagccttggagtgttgtgtgtagatgatgtccttaaaggagagagacgaaggtggctccctgcattcacccatctcatctccaagtgtgaactataatccttctctatctaatagggtagaaaaactcccttagatacttctctccatcttctattggaaaaagataagacagaccatgcataagagcacattgttaacgaatgcagggcagggtttatttcagtctagtttatctgtagcagcaaaaaaaaaaaaaaaaaagttctatgataatgaacagagttcaggggattcaggtttgaatatctagcagctgaccacagaaggttaaaatacgagcaatttgatgggttcccagagggatgctgtctacaggttcatagacctccacttggtgcattcatgaaataacaggagggaaatcctcctaggtgtcactggtagatggtttcggtggttgtaatgacaaacacagttagcaaggctaagcactacaccatccaacacagtagtgggcgtggctagagatacagagcccaaggtgatgggtgctcacagtagacagacccagtctcacatcacacttttatgagaacaataggatctgaggcaggtcacttatctctgagtcctgacttccccatctttagaacagaagtctttgtctgcaaagatcttccatgagatttaatggacatcatagacttagcagtcttggtatatataactgcaccgtatataactgcagctgggccatggtggcacacacctttaatcccagaactagagaagaagagacaggtggatctcttgagtccagcctggtctacagagtgagttccaggacagctaggactacacagagaaaccctgtcttgaaaaacaacaaaaaaaagagttatggtgcatgccttccttcttagcatacaacctctagtgaaatttaagtatgtgttagttctttctccctcatatatttcctttaaaatttctatttggcttaggggggtgaagatgcttgcaaattgagcctgatgacctgatttggatccatgaaacctacctggtggaaggagacaatcaaacccacaagttgtcctctgatctccatagacacacacccatttccacatgaaatgaatctataaatgtacttctgttaaattttctatttttaatcagattttaatcaaacatgtggcttgaactggtttaaaacacttgtttatcatgtattcatgaaaacttaaagagctttaatgtattctcagtctatgtaccactacttataaaaccctatgttttacctagaagataacatttcacttgctcagtctttgcctgccagggagtcactgcacactcaccttgattatggactctgagcagatagtgagcacttggtggaagtatctgttgtacagcatgacattgatttctcgttcatgagtgtgaggcacctgctttgtgtcctgtaccatcctggtcaagggatacatgtctataacacttgatcctggaaaggaaggaaagaaggaaggatgtcgcacagctgggtgtggataatggtgcatccttgtaatcccacactttcgagaccaaaatgggaagatcatgggtctccgggccaacatggactgcatagtgacatcacatcttaaaaatgaaatgaagtcaaaaatgaagaactttgcaaaagcatctcctccctaaattgtcattatcagaagtctggaatttcacagtggatttgacccagctagctaggtttggagccagccggccagtgagattaaagtataaagatgagtgccttagcatttactaaggtgagactactgttggctactctggaacacctctgacaaacacagcaaatgtgattcagccaggagaaagcagtcattggagacttcattatctttcaagcacaggtcattttgacccccgttttcctagtttttatagtctgctccctgctccttactgtgtgcctctccagtgtgtgcacgtcagtgatgctatccaccagccttctgctagtttgaggcttgctctggtgattgaaattgagtcagagagttcttcaagccaacaaatgataacacatgctgtgaacatggtctgattaaatataatgaatgagaatgaatacaggccagtgattgcaacatcaatagtaaaattaatttccaaatagttagcatggtcagggtgttgggaagcagtattcttgccttttcccattggtatgaattaaatctcaaaataagaatcttgtgtgtggtagttgagtgtaatgtctagaaatactgtgaatgtataaaagctttcatttttattgatttacttatttgcgtttttttaaaatctaagacagggtttctctgtgtagcccttgctgtatggaactcattctgtagaccaggctggcctccaactcggaggtctatctgcctctgctgcctgggtgtaaaggtatacaccgccatagcccagcacattctgtagttcaaacaaaaacagaagttttaagaataggaaacttcttcctacttattaatgtggacatcaagttgccactgtgggcactgcagtgactttcttaagtcattccaaagaaacgctccaagtcttagtagcagtttctaaggtgtttagattgtgtggtacagcctgttcatatgtaaaggactgagatagttcatcaggatatgttactcaattcaaacactactgctaggaaacatgatagatgggtggccatcaagctctcaaaggcacccttggagcttctccacacatccttaaagatgatactgacagttaacatagctggacttgcatgtgaagacctgacactttggctagtcatcctacagtaatggagataatgcaggaaaaagaacgaatgcagattcaggactcagaagttttgagatggaatctcagctctctttcaacattttactagtcagttgaactgtctgaggcttggcttggccatgttataagacttcagtgaacaattcctgcctcaaagggtgactatgcagatggaatgaagagtgaaaaggaagcaaatagttgttgtcattattgccagcgtattgacgccgacaccgacagtaacaattctaccaagcctttggtgcagtgtggctgcccacacggctcagaaaactactctacctgatgtcacttgaatctaagcacaaattactaactcgatacaatcctaatgtcaagcttatagctgtgcttatgtaattcatttattttatgtgcattggtgctttgcccgcatgcatgtctctgtgaggatgtgatggctgcacttgcaatgatcaggcaatacacagagcttggtactttgacaaagaggagcactaccaaaagtatataaatgtggaaagaattcttgacttttctattctccattttcttctttgtcttggtattttagccttcccttactctgatgataattgggatagaaatgctgaacctgataatcaagcaggcaagtttgggtattaagaggtgacatttgtgtagagtcattaatatgttcatttcagaggggatcagatggaagagaggcatcacagctgaaactaagttctggctttcagggtggaaaattatttattgagcatgaagtgatggttctcctctaacccaggaaaaataaacaacacaaaattaaaaataattatgctccccaacagagacagcaccaatcacttccctgccttaattaatcccccaggaactcagagcaggtggtcagtgataatatgcttaggaaaggcaattctggcttagtgttccagaggatagagctgctattaatataagcatttttcttctaaaagccgaaggctgtgcatgtgaacagtagccaacctaaatgcctaacaaggttctttgtctttttagtgtatctgtccaaatgaaaaaaaaaaaaaaaagacaaaaacccgtaacacaatttggcaaccaatgcattgtatttaggtcctatcttcctggattctgctctctcctctctctctctctctttctctctctctccctctcttgctctctctcttgctctttatctggaagcaaaggcagttgagaaggtctttatccatcttacaagatgaccaacttcttaccagcactgtcttgcctcagaaaacaagttcatgctggcacatgctagagtcaccatcctatgaaagtaccaatttactgcatccaagagacaaaccagagccctgggcatggcgacagctttcttacacctttctgcttaacctgggccatgtactcctaaactcataaccttatagaagtgacctagtattttcataaaagagaggttgtatatttcatcaactcacataggataagatattgaaataaaaatttatattgtcatgaaatgtggttagacattttttatttttttgtgttttcatagtaagagttatctttttaaatgtaaaatacatgaaattaatttatcttgctttaggtacacatacctgtaatgagcatgccatggttggaatcatatatcatagagtaaatctgcatgtctcctggtcctccttggctatcgtggaagacttgcaatactgatagagtctggatatcccacacccggaagacctggggaatgaatagaagtcgccaatttatacaccattgttctcacttgggacagctaagtctttaaagataattatgctcttataaacttgcagtgaaatgtgatttgcactgtgagcacacaggtgctctgtttcaatttggctctcgcttctaatgtttactaacatggagtaactggctgcaaagtgttgcttaagggtttatctttagtcactggattatcctccatcattaacaatgcccaggaaacataactaatcgaggtgtctattaagagatgaataaagtatgctacatatacacaatagaattttgtacagccattaagaaaaatgaagttatgacaatcacaaggaaatagatgcagctggaaatcaccttaagtaaaataagtcagactcagaaagaaaaagtacttcatatcttctcttatatggaaactagacgttgagagtgtgtgtgtaggcaagtcataaacccagaaaggagatcacaagggaggaggaagaaatgttagggaagttggaattagagaaagtaacagaaaggaaggctgcctgaagataagcgaccagctgtagggacagaaaggcagaaataaataagaaaatgtaaggcagtgatgcataaggatgccattctcaggtattggcaatatgctggtgcttttgagagcaaagggcagaggtactgaagagttctgtgagtgcttgttttctgtcagtagctccaagcagggcctagcagtgttcctgggaaggtgttggtgtcaaagtttgggagagccaacctagagccagtcagccctgggcaggcttagaaagaaaacaaggacaaaacatttcagaaagagcttgagttggtataagggacgagcatagaagattctcactttcactaaacaaatcttgggtgacagaacggaatatttacaagtcatgattaaatcttgcataagagcaagtgaacataaattaaaaaattcagtcttgtagcagtaagagttaaaatgctgactttttcccaacaaattgggagtataagaattagataaaggattatgttagcattggggaaaaacactgaattatgaagctgattaactctgagaatcaggtgcggggaggagctgaagtcgctagccacaaaacatcatagaaaaggacaagggagttttgcccaaagccctctgtaaggaacaactaatgagtaatgataaggggaatatgaaaatataagtgttgcactccaagggaaacatgctcagattcagccacagcttctggcaagtttcacgtcggttgctattagccaaaggcattaattaattttgttttcctttgatgagtgtttgccatagaatgagaagagtgaatatctgagttttaggagttggtgtcagattcacagaacagagaatatcctagtctaaaaaggtgcagcactaacaagacacaaataatccatgaactgggagaggcacttcactcaagggtgatgaccaatggaggtgctatccgtgtcactgctgctgactacagcaaagctcaggcaaataatagggaggagatgggtcattctattgcaccataagtactctttaaatggaaacatgagcattgagacacagaggaaaaaaatcatcattagagcctgtctttagaaacacagtgtcatgtagatggagtgagcaatttaggaacagattaatctatcatacattaagggagtctgaaatttgacctgcctttctaaacattacccaatgaccacaagcagttaagagctgaatcagattgatctgactcaatgaattacatgattttacattgtgaggagcctggaaatgtgtgaggccatgaaacccctttgagagtcatcaccatggagagacggtatgtgtgagagttggtgtgtaaaactgaggtacgaacggcctatgtacagctgtactacaaatggacataggtatttgacatcattcttatgaggaattcagtgccaagtgtgcttgtttatttgctctcagcaagatggcatgaaaaattaagttagcaatgtggaacgagacctgctaattttattgttttgttctcacatcttttcccctcagtgtgacaactgactagtaaaaaaaaaaaaaaaaaaaaaaaagatgagatgaagtcattagcacacacatgatttaaatatcaaatacttggggaggggctcataaatccccactcctagctgagagtcgacagttgatggctgctgagcaagggaaacaaaccttctctaggatgagccctggcaggttatccaatgccaagtgatcagtcgtaaccaggaacacatagaagcaacagtaaatggactcagcaggttgtatatatacatatgtaaatatacgtagcaaaataaagtagggaccaatgggaagagttgtggaggagaaggaggggtggaaatcatggaaatgtagttctcatctatggaattctaagaaaaaaattacaattgctatcaagactaaccacacttattgaacttattcttaaaactttttagtagatttaatcaaacaaataccgttttgcaaatacatatttctaacatttataacttatttttttctttctgtattacttttgacagaatatttaaatcagtttcataacaaaggaaaacacagaagtccttgtttgtttgtttttttttttttttttttctgtccttaatgatgagatcttctctagaaagggagcctctggtactttactacagaggaaaatctgtctttctttccaatatgaagttttacatctgtctctaaacatgtcctgtctcatgcagtggccaaaaccaacagggcagtggctgttcttctgtatgatgacatcattttttttctcagcagtcatcagttacttcagagaaaaaattatgcatgtgtatgtgtgtgtgtgtgtgtgtgtgtgtgtgtgtgtgtgtgtgtatgtgtgtgtgtgtatgtgtgtgtgtatgtgtgtgtgtgtgtgagtgtgtatgtgtctgtgcatgcgtgtgtgtgtgtgtgtgtgtgtgtgtgtgtgtgtgtgtgtgtgtgcgcgtgtgcatgtgctaggcctccctgctgcagttgacttgaaggacgagcagctttatttgggttctactattttcttctggttacctttgccgaggagaggctgatgacgtgttgctctttctcattgcttacgatctctgtgatgctgaacatgtggcccactagcttcccgactggcttagtgctgatattggggtgccacaaccggaggactttatcatctcctaggaaggacaacagtgacagaggcctcgtaatctcaagtgctccaaagtcaaaacatgtcctcattttatttctgtggctgtgataaaacaccttcaactcacaatttcaggtcactgtctaccagagcaggagcataaaggcagcagtaatttaaaacaagtagtcacagcacaccccccatcaagagcagagaggaacgagtgcaagcctgcttactgctcatccagcgctctctactcttccacagtagggagtcatgtggcccatttcaggttgggttttcccacatcagtgaatgcaaccacgacaatcctcatagacatgcccacaggcccttgggaaccaggccgtccctcactgagatctttcctggccattctagattgtctcaagttgacaattaaaattcaccatcaccaaaagcatctctcattcagggagatcctgatttttttttttaaaccaaccccagcccacagctccctggagctttccttctgcgaccgacttgtaaggcattagcctggctttgaatctgtctgtgatcaacgtattttcacatacaaatgtggattcgtataaatatttcatgaatacttttcttgattcaatacttccctaccctgccacgcattaatacattatttatactttatttatttccaaaacaaatttcaggcagctggtcttttgtttttacagccttaaattatgcaaacattataataataaaagaaatcaagggaagaggcaaactgctcataatctccagcatgagcaaatcatccgccatttatttttccactttcctttttcttgcagaaccacaagcacaagacattcatatgtaattactatcacagcatagattttgtcttttaattgttagaatcatctgagtacacagtaaaataatgaaacagtatagaagggtgatatttttataagaaaaaaaaagtctcccagcctgcccccttatgccccaatttctagttctattccctagaggaaatcactgttcacagtttttgcagttcatttgtgtgttgtgttgtgtgtgtgtgtgtgtgtgtgtgtgtgtgtgtgagtgagtgagagagagagagagagagagagagagagagagagagagagagagagagaataaacaccagaggtcaagttcgagtattttctgcaagtgtgctccatcttagtttttgagacagggtctctcactgagcctgaagagcattgactgacactgtagctgcatatatttgtagtatgtgttgtaagacttcaacacctgtatacagtatgtaatggatcaggaaaatatcttttctgtgttgggaatgttttcaaatcctattagctatgttggaataatcagttaattgcttggaccatagttctcccgttatgctgctacagaatgttagaagaaattcctccttccctactgtgtgcctctacccatccaccatctctttgcatccctcactccctgcccaggctctggtaactgctgttctactctcttctttgagatcgactttgtagttttcacatagaaagagaacatgtagtatttgtctttctgtgtttgccttatttcatcagcatgatggcctcaagtttgtccgtgttggtagaagtgatagaatgccattgttttttcttttttggtttttcaaggcagggtttctctgtagatttggaacctgttctggaactcactctgtagaccaggttgacctcaaactcacagagatctgcctctgcctcctgaatgctgggattaaaggcatgcgccaccaccacctggctcttttttcatagttaaataactttccattgatagttcacaatttcttaaccatcatctatgacatattgttctgtgattctggattttatcttttattttattcagcagtgctgtcagggacagcctgtctgtgtgttcactttgttttttagattagttgccaacagtaagttgccaaaagtagaaacattatgctaaatcatgtttatgactttaagacacactgccaagtggctttccaaaatgcttctaccacactttaaggccactagctttatcagtctgaccatcgtgtgggccctgtgatttcaagtataaggcactttaatgcaactaaaatgatgttcattttgctttacatgagtgctgaggagaaaattcagatacccttgcagcaaacactcttacatggagccatccctccagcctcttctttctactttctgatacattattccaaacccatcatatctgaatcactaagctaaatgatttaatactttaagtcatttaataatgaggagttcatttcttgtaatataaggatgttggatcatacaatttctcaactattaccttgaaattctttaatatttttatgattcagtttccagaatgatatttaatgagttatttctaaaatagaaaatctgatatcttcaaaataatctatattttaaaaaccactacacaatagactcttttaaaaaccataaataaattatggctatgcatttgtgcaaataacaaggaatgcttataacaaattccaaaatatatatgacacaatgaaaatatttttcttcttagtcatgttaaatcttggctcttgtagttatttactgaaagttagtaacttaccacacctaagttcaaggaggctggggaagatggtgtagttgagttgctcagaaagagaagatctgcaagtggagcaaagctagccagcctctgcatgcatgtgcatgtgtgtgtgtgtgtgtgtgtgtgtgtgtgtgcgcgcgcgcgcgcgtgcgtgcgtgcgtgcgtgcgtgtgtgtgtgtgtgtgtgtgtgtgtgtgtgtgtgtgtgtgtgtgtgacctgtaagtgtatgcttgtgtgttttcacagtgcctctggtgtacatgtgcctctgggtgcttgaggaagtcagaggagaacctttgggtaccatgatcccctttataccttctaattggggtctcataaccaagggacagttatacatagatgctaaatttaactttatctattttgcttaatctgctatcatgtatttgaccacccataggaccaacttgcctttatatgctagataatttgtataagtagccatacccatgctgaaagagccagttaggcatagggtacaactggaggacttagaagctagatactcataggttagccaaatgtgatagattcagatgctccaatgattcagattattttgttgggccccaagaaaagatattgtagtattttctgtacccttctcattctctcccaatcctttcttcaaggatataccagagaacagctacataattaaaaaaacagaaaccctgagtgctgtgtcaatgtaccatcccacttcacaatcgtcctttattatttatttataataaacaatctactaagttcttctttgaggcagaattcccttctggtttacagtgctatcctagcagggaacatacagtaagagctcatcaagtagttattgaggagtcacagctcagaggtttaactgataaatgctaagggatggaggtggggagaacatacatctaccccaaagggaaccttggttgattatttgtctagtacccttgtgaagttcaattatatcatttagatgctcagatcttggagtagcatgagaagaaggctgaaaaatgaggactcaaatggctcttatttgctggggaccaaattgtgccctctcaaaatccttgttgaaatcgtaaccatcaagtgggagggatacttggaggtaaggccttggggagatcacttcaaataaggtcataaggatggggtcctcataagaagagggaccaggcagttttcttctcatcttcctacacatgaggaggccacctacacagcatgaagaaggtccttattaggaggtgaccatgttgatgttttgatcttgaacccgaagcctacagaattataagataatggaattttgtagtctgagctatgtaatgtatgaaatgttttgttatgatagcccaatcttattaatgaagcaacacactatctggaggtagatcactagggtattcttaaattcaaatattaagaacaagaatcaaactttccctttattacccatgtggaaatttgctagattataatgatacaaaattctagatattattcttccctgatacctacttaaaattatgcaatttttatttatttcttttgtgtgcacatgtgtgtatgtgggatgggagtatgtgtatgccatgatacatgtgttgaggtcagagaacaacttgaaagaattggttcctatcttccttatgtgggtccctggggttgaatgaactcaagattggcaggcttggaggcgagtgccttcaatgagccatctgtcccaaagtctacagaagaagaaggagaaggaggaggaggagaaggaggaggaggaggaggaagagtcggaggagtcggagtcggagttggagtcggagtcatatgcttttgaactgaattctggattcctctccagtgtttcccctagtctcccttcctggtccctgatgaagttatttctttttccatgctctccaggtctcagacttgtgcagcactaaccccataatcatagctctgtctgtcagttgtttacatgataagccttggatcagtcatttgtagtgatgcttgacagatacaggtacactactgttgcttgctaagttagtattgtaagtgtttcaatttgaaatctggcatatcatttattagctctataactgagtatcttgctctcctagtgcacttaactcatactgttgttttcttgtgagaataaatgagctcatacacatctaactgaacagatcctgactgcgcactggacatcagcaccactagtgtgatggttcatagtccctgcttgtataatgcattctacaaaatgttgggggagattgggagaagcctctacacagacatgtgaagtatgtcactgatttgaagtgcttctaatctaatatggccataaggcatgtgtgaaatatttagagagaaatattgaataatcaaataatatactaaataggatgtattatttataccatttatattatacattatggttcataagaagttgatgccctgttgtattattttctatttaactcattctctctctttcccctctgcctccccctctctcttttactgaggcaggatttagacaaagctactcatcaaagacaggcttttctttcttttagcagactcatctctgctgtgcgtcattcagtcccatcccatcactttgatgaaataagctggctcatatcacagaggacagtgtgggggagcgccctgatgcacaggatcacagtggtccagaaaagaaaaaacaaggctgagggcaaagacagttgattcaacctcagctccaccagcggactagctgcacagcttgcggcaaatagtttcctttgtttcctcatgtgtaaaatgatgatctccaagattcagttcagctccattttatgatttgggttctgggaagacaaggttactttagtgagagtagagagcaagctaacatcgttatagccacgaggaagccttcagaggttcagtcacctgcttcaaagcaataattccaataattcagttatttttccctctttgcctttcaccaacaacagccaagaagtatgatattactaggcatgttcagaaatctgtccctctggcccacaagtaatgataatggtgactgtggcatccctgaaatggttgttactactaccagaggagttgaggctctccatggaagaacgtctatggcttctgtatcacatgaagaagagtacaaaaagaggacatctgcctgagtcaccagcagtacatgttgtacatgtagtaaggctcttggctgagccaccagtcaacaagagtatttattggtctggagcaatgtttgcagtcattgagaacttgcgttgttttttactaatagtctttattaactacaacaattcaaaccattatgcatggtgaaaattagttgctcattaatcacactgcaacacattcaattgttttcatgacagcctcttgacctggattttgcctgcgtatattgtggagaaaaccatcttgtctacctccagagtgggctctactgcttcactagatgccaacagagtcctcatatagaatgtgatgccactagaatgagcagaaaggccaattgaggccacatgaaactgagctcttgagatctacaatgctacactcatattcttgcattaacttcatcaccaccatttgttgactcagatctgctttgtattagagctgtctagaattgtcatacttttgctattagagtttgaattcttgaaggttaggatcacatcaggtcggtccctagctccttgtccttatgtcagttacataaagatatttgttgaacataacatgaaaaaaaattcatgtagtgctgagttatcacaggtgggagtcctggatttttatgcttggaacattccaaatgagatgcttaattcttgaaatgataaatgaagacaatattaggtttaaaaaaattgtgttagtgaacaaataatgctcagaaaatttaaggttttgttgttgctgtcgtaagttcctttgatgtttgtttgtttgttttggtttttcaagacagggttttttttttttttatagccctgactgccctagaattcactttgtagaccaggctggccttgaactcatagacatgcacctgcctctgcctcctgagttcgtggttcaaaggcatgggccaccactgcccattcctgttgggtatttgtttgttttccatgttgtttgtttgcttcccgaagagctcctgtttttaccaagctcatcaagggtcctggtacactcaacacaggcagctgtgctgagcagaacagctcttgtagtcagcagtggcacatgctgtttagaggctcatggctgagccactaatcaacaaggctattgtcccgaggaggggatgtttacagttactgagaatttacattttctcccattagattctccacatctgtgggaattcattaagtcctgcatgctgggaagcactagctgcttgtcagtcatgctgctcaacatttgctagcctccatgagagcgtaaaccccttaatttctgagctgtagttgaggattttctacgatgaataacaccaaggttaatagcatcatcgccctcattataacagtaaagtcatgtgattcccagaacattcccaaaatatttttccctagaattgattacaaagctaagcttacaacagattctaaaactggtatccataaagttttgctttcttttttgtgtgaacacaaagaggtagttaagattaatgttattcatgtgttagaagtcagctcctttggccagctacttgaacactgctcagtcaaagggtttgtgttggagggatacaagtctatttgcagacatgccttgatggggcagaatctactgcagtttgattcttagacatgctgcaatttgcatctggaatgttccccttgagcacagtttgcactgctactgagaactggttaacgctttgggaggtggagcccagtggaaggaaatgaggtccttaagggaatgcctttggaagagatactgggaacatggcccttcctgtatctctttgcctcctagctgccctaaggtaaactggatacttctgctgtgtttcctggtcatgatggtctgcctcttcgtaagcccacagtaacagggccaaaacatcaggggctgaaacttctgaaagtgtaagttgaaataaaccttccctcctttaaaatagattgcttcaggtattttatcagatttttggaaatgctgattaacacagtatgctcaatatttcatctgccagacaatgtgattgacactggagccccctccacttcctcctgccttatagtctaggcttggaagtacactcatttctaccaaaaatgataagccaagacagttatcagctcagaaagaggctaccgaggttaagaaatcatgatgcaactttctgtctagaaagtaccagggtctagcatttgttcctgtatgtgatgtaggggctcctttaatggccagtgtaatgaaaccaccgttgagagaatcagattcctgtgtgttcttagaatcactactaggtgtcaggaaacatgtttctggttgtgtgccttccattcttttcttaaagactttagctgaattttcacaatgttggagccacagatgccttattctataaaaaaaaaaaaagctttgtttatacaaagctgtatatatatttccagtaatatttggtaacaaacggagttccagcatttacaaggatatcccctcagaatgtctttgaaagttgtaacaatagtattttaggtcagagggctcttggaatgcttacagttcaacttcctgattctgccagataaggaaaataacagggaaagcacaaatgattattgaatattgtactggttactgctggcctggctataattaaacctagttcttctatcttccattgggctttctgtccattagaccactgtaaacatttaaaatatgaatcataagctaatttgaaaaagtattttgaaagactaaatgtggaatataaatttaaatataaaatgcacaataaacttgaaaaaatgagctttatcttttcagagattacctaggcctgaaataaaaatatcttagttaaagtttctattttgtgaagagacaccatgaccacagcaactcttataaaggaaagcatttaattggggttgacttatagtttcagaggtttagtccattatcagcatggcaggaagcatggtggcatgcaggcagacatgatactgagagttctacatctagatccacaggccgcaggaagacagggacactgggtctggcttgagcatctgaaacctcaaagcccaccccaagtgaccacttcctccaacaaggctgtaccaactccaacaaggttacatctcctaatagagccactccctaggagcctatgggggccattttcattcaaatcacaacaaagtgtatagatgtttatacttagtagtagaggtgttccactgggcttgggctccacagctctgctttcttactctgtgttttctgcaatgggcttcatcttttgcaaagagaatttccctgataaggggtgaggactaatcttatctgtgggtataaggacaaatgtttaggatgtaatttagggattatgctgttttagaaaaatggtggttgttggttctcctccaagatccatgacttccctagtcccgaaggatggcttattaaagtgtgccataatacctagaagctgcagtaaaaggaatagacaacatttaaattattctataaagttatttctggccataaaacacaaagagagccctgggaggaacccaacctctgatgggagccatcctcttacctccagtcacaatcacgtttgctttcatgcagtagcagaatgtgttggctcctcttggcatggcaaattctctgacaggcctggaagacaaaattagatgtgcaatgctaattgcaacttagaaatagattatgtttaatgggctcctttctaaattgcttgtaaatctgtttgtccatagtaactataagtcctgagaggttagtcactgagccacagaatttctatgatccctgttttagtttgggtatttcacagaggcccatgggctaaagacttagccctacctctggcagtggaaccagtatttatccctagtgcacaaatggactttgggatcccattccccgtggagagatactctctcggcacaggggagggtctaggccctgccccaaatgacatgacagattttgatgaccacccatggaaggcctcaccctccctggggagtggatggggagtgggatgggggggtcaatgggggtcttgggacgatgtgagggagagggaactaggattgatatgtaaagcaagattgtttctaatttaaataatacacacacgcacacacacacacacacacacacacacacacacacacacacacacacaacttagctctaagttatggtgtgtcaagaggtggtagaaccattcaaagtcaaggactaatatacctggaggtcaggatgcttttccttgctttgcttcatgatagccattaggtaagtgaacagtttaccatgtgccttcctccctgacccctgccaccatgatgtgacatagcaagtctaaaattaacagggctaagttaccgtggactgaaacttccaaaactgtgagccataatatcctattattttttaaattgattgatcccaggtacttgtaacagcaatggaaacacagactatttaaaaatttagaaaccattcttagtttgctaatgccatgaatactgctggcccactggatttgtcccttgggctattattttctgattcatgcttgagacatgggaacatggagcccgaagcagtgcagggctatgataatattcaatttcgtcttttaaaaatgttctttagaacttgttcttaggttaacaagaaaagggaatggaagtttattgagtactcagagttccaggcatcaaatcagggacttcacaagagttattttaaatgattttatgtctgaaaatgtcttcattcccatccaagcaagggaaaactgaggctaaattgtgccaatagtcatagaataagtgcttgggcagaaattggtattgtctcattccatagcaaatttatggaatgccactctcatctttccactgtaagattctgcctctcagttgagcaactaagaaaaggcagtgttaagcagtttcttgctcagctttaggtaaactggcaagctgtggctgagtgagaggctcagcttgtatgcgacaacaggatagcatgctatgtggcaattagttgcagacattcagcagcttcctggtacatagctctaattctgaaagtcccacacaaaattttaaccagtatgctaatcattctgaaatgaaaatttcttgagagtttcctttcctgcatttttggggagatgggatgactcccattttaacagctgaccaattatgtatttgtataaatacagtttcatctgaagcctcattataggaaattgcagaaataggaaatagaaacatgttgcattcggaatgaaggaacccaactgtgatggctctctggtggccatggcagtccaggaaaacatgctcataagtaccacttgagaaatctcttcagcttctagatttagaaagcgtgacccgagagaaagagaaagagagaaagagaagggcaagcagctgatgggttcctggagcacctgatggatcaaggagccctgtttgctgaggttgtctgagtatttttatctccttgcttcctgactccagctgtaatcagcagagatgcaattaccacctaccaaattccaaaagagacagtaaatatcaggaagtccagaatccatctggaagacagactcctgactattgtgaaagagatgccctttgcagcaaacaccacagtgcaccagttggttggagggttaaaccttccaggtaatctacttatgacttttaaggaccaggtctgtgggatactatgcagcatatgaatttaagtttcctagaacagaatgtttgtgtttgtgtgtccatgcatgtgtgcatgtgtgtgaatgaaacgggaaataagggtaacaaaaaataagaatatgaaaatattactaaatcatctctaaggtcaccacatactcctgtgccactattaattttgcctagaatcctgctaaccatatggtcatatttcttctgacataacagcaacatctgatctgagatttaaaatgaaccaaaaaacaaaaacaaacctctatctctggctctttgcaaaagtgagtcctccattcatgaagatctctgcttcagcaaggatctcctaagaacagcctctagtgatggtcctgacccaacactgcctcccgctgccctccaccccaaatgctacttcattcccatcacttaatttatattatctgtttattgtctgcccttcctacaagagcgtgattagtcttttttaaagtatttcctttatttttgagattatcatataattagatcatttaacctttccttcctccaaaccttcatatatagcccccttgctctcaaattcatggcctctttttacactaattgccattacatacatctatgcgtacacactaatatttccaatacatcctgttacagtctgtataatgttatttgtctggatgtgttgggggcagaccattcggtattggataaccaattggtgtgcttgtccccagggaatactatttttttccagctctcagcatcccttagctgcctccagctctttgtgtaggggtgacatgtctaatgggatctttcttgtttggttcatgtttaggcagtcatgttggtgaggcttcatgggttctgacattcctaggtgatacgatctcatagcaaaatttctgatcctctggctcttaatcatgctgtctcctattctggaatgttccctgaaccttaggtgtgggagttgttttattgatatatccattgggactaggctctacaactctgcatttttattggttgtggattttccagtaatgatttttgggtgctgcaaaaggaagtatccttgatgagatgtgaggactacacttatctgtggtgtaaggacaggtatttagaagttagggattttgctggcttagtaaagtggtggttgtaggttgtaggttgttgagtgacctttaagttaaattaaagagctgttggttactgttgtggtatgtgagctactcattgcactcttagggttgtaagtaccatgctggtcattgctgtggttcataggttttatagctgggtaaaaatgttaattgcccttctttggaagtttgcacagccccttctggtactcatgtcaccaattcaaaatgtaatatgctactgtaggtatttcttgaagggtggttcctatataaccatttgaattctaggggctatgagttaaggtaatgaatatgtactcaaatctaagaaccaggcatagcttgtcaaggattccaagaccagttgacccatgggaaatggacaaagccattacccatatgccccagaataaaaagatatggcaaagcttttcttgggagtccatgtatgagtatttatgaaagacagatcagtgtatgcaaagactagcaaaggcatcgtccacctcctggatgtttacagcttaagactgatgatctacagggccccctaccaagactagctaattcctcttcatgtgctgtaaactaataaactaaggttccaaattgggctgatagtattagagaaccctacctgatcccaactttattatacatgtacctctatgctaatcctgtcttcattctctcaccacctctagccaaggttccaggactaggcagagttgttatccacggctatggccatgttatgaattgccagcacaggataaaatcaaattcgatatacagttgcacctatttcttaattagtttgtgtttcagaaatgtacttctataaaacaccagtatgcactcattagcaattaattatgtacagaaatgaaataaaaccctataaataactgcatcatataaatgacatttgtggaacctagcccagtgtcagggaatgaaattacttttaatatgcggtgaagcttttaaatttatctttgaatgtgacaatattatagaccaaaataagcatttcagcttctaagcaatgaatacaaaatgtgggtctttcatgaagtccacaattctttttttttttttaagaaaatgtaagtcatctgagagatatgatagtctactctattaaatttctaattcttatttctttacttgaacttaagcttagaggttgtttttgtttgtgttttgttttttgacttgccttttccacctatgtatatgttaattttatttattaatatatacatatgttaactacacatattaagaatgtgtttcttgtaagcaatatatatttggttcttttttatcatcagataatctccaactcttagctgtaacatttactattgacatttgaagtgattgttgatatgagatttgtgtctactatgttaattattttctattcattgcccttgtggtttgttcctatttttgtcttccacttttttttctgtctgtttatttccactgagcatcttatgcattttcactttttattcttttgatctttgtttagcttaatttctgtgtttatgaattttgtacttctgtgtctggctcatttcccatcatcaaggttcatggttgctgttttgcttctctaagcatcaactgtttccttctagtcccatccttcctcctcttcttcctaaggttgcactggagtttgtgatatatatggtatacagattcatagtagcataagtaatttataaagacaaaacaatactaattttctctctaatcccttgtttattgctctcattgttatttgacttatacacaaacacatgtatgtgctcacatgctcaaggatgttgacactgtcatttccttgctttgaagaacttctcatagtattcttgggaagcaggcctactcacaacaaattcctttgacttttgtttgtccgagaaagttttaattatttttattcgtttattttttttaaataaggtctcatgtatcctagaatgacctgaaactggctggtagccaagcatcactttgaactcctggtcctgctgccaaaaattctgggattgcaggaatgccctactactcttggtgttctttatattgaagagtaattttaaaagcaaagtgcacagaattccaggctggttgcttttgtttggacggttttgcttttttcttgtcagcactaaatatttcatgctactctcttgcttgcatcatttctggaaaagtgtgtgtgtgtgtgtgtgtgtgtgtgtgtgtgtgtgtgtgtgtgtgtgtgtgtatgtgtgaatattaggcagataatactcaaactcctaattaggggtgttttctcacccctaataccaacttttctccaactgcaaaaggaaggaagggagaaaagaaagaaacaaaatgtcccacagacttaccaacaagcccatctgacgggagcattttctcacctgatgtttcctcttcccagttgattctagagtgtgtcaaatctatatgaaactaggcagcataaaacttatttaaaacttattaaacaatgtactgttacacaggtctattataatttatattcttgtgaaagttatatgatatattcacctagtaacagcccttctctctatctggctgcctattgggaagtttgctagctccttgtctgtgggacatttatttttttactttagttattgacgtggcaagtggtcctgtgggtgtataagaaagcaggctgagcaagctatatggaacaaaccagtaaacaacatcctccatggcctctgcatcagtttctacctccaggttcctgtcatgattttcctggatgatggactgtaaactgtagatgcaataaactctccccactgcaacttgtttttagccacaatgtttttttcacagcaatagaaaccctgattaagacaagtttctccacgttagaagtttcccatttgagattcccactcctgtcatcagccctaggcaaccaatgatgtgcattttgtctctataaatctctaccttgagaaatgtcaaataaatgaaattgcacaatatacagaatttttacccagcttctgtcccttagaatgtttctgaagtttatctgttatagcaaatatcttaaagactttaaaaattccgatgcccagatgggagttgctgctggggggaagtgggaggagctggaggagaggagggagggggaactgggattggaatggaaaaaataacaatgtaaaaaaaatcaaatgccataactagttattaggaactacttaaccagattgaaaatgagtcagatattactcaaacttacaattctataagaacaccagctggcatgtttatgatagataagatatgattggccacataaagatcagaagcatagtttgctggctagctaaaatgattctgaagtataaacttttaccaacaaaataaatgtttaacatatagatacgggtctatagacttattacaatacattagaccaataaacaattctttgtagtgctgggaacagaagccagggtttcacaaatgctaggcatgtgctccagcttgggcctacagccccagtccccactaaacaacaattgggtacaagtggttgtaaaaatgctgggtgtcccagaatgctcatatagatacactgttgtacttacaaattgtcctcaagtctcttcaaggattccaaaactaatgaatggacactgtctaaggagcaggatccaaagcaattgagagctggaatgtatctgattttcataacccaatcattatgcagcttcctcttaacactgggaatgaaaaggggtggaggttatgttagatacacaaatgtttttttttctacttagcatttcatttggtttgaatcaaattgtgctaagtctgtagccctatgtatcacaccattttttagctgtttaagttgtctcaatctagcaagtttaaaattaaaaataactttataagactcttgttaaatcttgagatatgacttcagcagtaaaggtgtgagtcgatttgattagatgtagaatcatttagcaaacatgatgtgaacggggtttagctgaggaaggaggagccgccaggcatgtgggtgacaccattccacgggctggaatccaagaataaaagcatgaatgtccacagtcattgtcctctgcttcctgacagaagacgtctgacaagctcacagtcctgccaacttgcatgcatcgtcttgttggactgtattccttctaaacccagaagcggaataaaccttccttccctaagctaatttaccagatattttcttacaaggaaggaaggaaggatggaaggaaggaaggaaggaaggaaggaaagatggaaggaaggaagggatgagaaaagagtaatctaaaggatctcagataagagcacatggccatcttatccttactttaatgaaaaactctgagcattcacatgtgattagcatagaattttgagtatcacttgtcttctagtagacgaacagacacatttgtgactccaggtatcatcgttgtgcagcaggggagggagcacagtagaggagaggagtttgtttgtttattccccatcctagattctgtttaattttgaactcttgataatggatattcctctaatatgtacactgttccatatatcagtattttctgcccacacctttactgactcaaaatgaacaaattctgagaattgtcaacttcagtcaaacttttatgatggacacaaacttaactgtccttctcgccttatcgtttttccttccatcaggctttaggatctcttggcagaagaaattcctcaacactcatcctgtatctgtacttaaaagatttaagtagatggcatggtgaatgtctgggtataaattatccttctcaggaagcagtaggatcatatccattcaaccacaccgacagacctcaaattcctcccaccccaccccattctcacttctgacatgtctatctaaggggaggaggaactgacaatggaccatggacctttctgacaagtggcccacctcctagtggagataaagttctattatctgggtctatcatgacagaaacaagggacccatagtgtgcagggcagcaacccacacagggactgcataacacagaccagatgaagagggcaggaaacagagctgtctttctgactgttattctcagagtgacagcattagggctgatcttagttcagtgcaaggtaaggaccagatgattcatgtatacacacagtacaagtaaataagtactaaaataataataatgtgtttgtctgtgtgggcgtgcatgtgagtgcaagtgccaactgagggcagaagagagtgataggacctgaaatgacaggcatctctgaactgcccaacatgggtactgacaaattggtcaggaccccctgcaagaacagtccatgctcctaactactgagcccaagagaaatttttaattgaactctgacatctattaaggagtatcaacttgtctctcatacttattacaaatatttgttgcaggctattttacttcttaaatttattcttttgaagaaacataattgggcatatagtcaaatctatcaaattattttctttaaaatcagcatctattgtttttatgtttagaaactttcttattcaattgccaggtagtagttataaatacacacaagtatatattttgtagatttttttatgatgtcattttaagtttaactcaacatatcagatacttatagattttaactgtcaatgacacttaaatttcagttgcaaattgtgctttctttattatcttggaaggttcttgagatgagaatggtattatctgttttttgtttttaaatttattgaaacagctgggtgttggtggcacacacctttagtcccagcactcagggggcacaggcaggtggatctctggaagttcaaggccagcctagtctacatcttgctatgtaatgcatgctagcctggaattccatatatagtctaggctagcctcaaactcataattcttctgattctgccctgcagagcctgggattatatataggtgtgttcctccaagcctggattaggcatgactttgatcctcaaaagaactgtgggtcttgcattccatttcactatatgtgtacagaactgaacaatgcccacaattgttagatccaaggagaattattcatgtaatgtccttaccttttgaagttttttgagtctaggacctgggtttgtaatttcttctttgtttttgcctgctttaatccaaagtcgtcgctgtttacagtgaacttgttcacaaacccaccatcatctcccaggaggatgtcatctctgcagagttggtcagggatgggcaccacgcacacacacaacaggcagtggtccatgggcttgataacaaaatagtgcccctgaaagcataggaatgttgggaattagttacactctacgtgatacacattgttgtggttttactcagtagcaagtagctgagcacctgctcagtatgtatgaggtgccgagtttcatccccagtatcatacacacacacacacacacacacacacacacacacacacacacacacaccagacatgtgggttgggggaagataaagaaaaaaatttattcattattaatggtttttttctgtgctgtttctcattttagatccaatcgtgatacagtgatacaggaacttgggaaagctatgaaaaaaattaaccaaataaaaccaaattaaagctgtgagtccagctcaatgcttttgggtgttccttgaggaaaggaaagctactctttggctggatgtgtatgggatcttaggagctgcaacctcgaatgccttctcttgactttgtatggaaatacggagccagcctcaaactcactatatattctagaccattcttaacccaccccccacaaccactccctcacaagtgctggaattccaggtgtgctgccactgtgtctgctttatggaatcctggaggttgaactcaagagagtctcatccatgctaggcaatgctcatgaattttatatggaattatcagtagaaaagtgttctaacacccaagtttatccataaatatccaacaaacacttgcaagctgattctgtaccactcaatgggttcactaagctaggtagttattgttgcttttccagaactccctgtcctaagacggaagaaaagcagatgaagatttttgttatttgttccatttccttagaatgagtgagagttgatatatttagaggttccctaggccaacagctaatgtgtagtgagcagtaaccaggtgccaaacattattccaggcatggttgtacaagatgagctcaacagagatttccactctgtaagagcaaccctgccagaagggaggacagagaggatgcagtacatactagaccagtgccatggacccgtgaggacactatgttccgtgggcagaggtggtagtggggtagggtggggggatgacctttgatctgggacctaaactggtggaaagaaagataaagaggcaggagaagacaaggtgctccagattaaaagattaatgtcaaaaagggacgagaggggagaaactgaggacccttggcttgccaagacagatacaagggtgttcagagagggcgagagggagggagggaagggtaagggagaagggaagggaagggaagtgagaagagcaagcaaggctccagcaggagggagagagcctgaggagaacagggaaatggtgggatactgtgaggaaaacaagctgacaaggacaagataaaggttagtaggaaccacagacaactaagctgaactcgcaggttctgttctgtgatgatgtcgtgtggtttgctggtttgcgtctccccaggagtgctcagccaccacgtgcaccagaatgggcagaaaatgtctttccaagttacagctggaagccagcagggggcaaagatggccttggtgcccagatgtcccacctagggtgcaggcaggaaggagggaatcacgaggacctagagataaggaagaggcttctccgagttaaaaatcaagtgtgcaaacaggagagcctgaacagagagcacaaagtccaggccctggggcttagtgttctgagtcagctacaatcctatgagacttttgctcttcctatggatgctgggctggggagaaaggctttgcacttgataacaagcataaccaaaatgaaaatgattggatttgtagaaggaaatgcaagagcaaacgagtctgatgtggtggcaggaggatgcctggagccatgagtaccagtgaagagcacaatgagtgtgtggagcctgctgctcgacctcaggaaacaacataaaacccaaattccatagcaacagcacaaactaaaagaattacctctccctctcaaactgaaaacaaaatgagagccacactaaaagaaaaccacattcccctttcattaccagatattgaggctgaactccatcttaagtggttacttagttacttctctacattctaacaggtactccttacactgcggctgggctcctctccttacagtgattgaacacgcaatctcatttctttctatcatttctctcagcacagtacctggctactcccttgagctttataatcccagacgacgatggtcctctctgtagtggcaacgattctctttagctggcccaggtaatcacagcctgtgatccaggaggtatcctgatagaaaagcatagagtcagagactctgggactaaggacgacactcaagtggtagagcacttgcctagcatgcaccaggccctaggtttagtctccagtactgtaggacagaggggattgggaatcacagtgcttttccttctcaaggtgctgcacagcaggaagcaggctattgacactagaaatctcaagtggcaggaaagcctacagagcatctccttggagtggcataaagacaggaaaagggtccctccaacccaccttgttctcagtaccaccatctcaagactgattcagctagtgtgggaattgctccttagaagagcagggcagctgaaggagcagccagctttggtggagggtcagtgagaccatttgtttacatgcacagctagaaccagagcaccgattaagcaagtgctccagccctgctgcttgctaacactttcctctagaaaagcccttagtgatcatcgatctatctgatcataagctgaggcccacagtcttcttgggtctcaactcaagtctggaagcttttacagcatcagcaggaacaacagcctggattgcctgggatgtcagaaacttatgtgcacatgaatcttccataaaaccaccaggagtccaatgggtttgttccatttcaaaaatggaggctgagaagcttaacaagaatcggggctcttttaccaggtagtgtgttgtctcttggtagtttggtgaattcattgggtacatgaaaacagtgataaaacaaaacaaacctccagcatccaccccatctctcaaacatcttcagtggggatggtttggaaagcaaaccaccacagctttccatctgctgcaagctcactctaaagactagtgacatgcaataagaatacaaaattgcactcgaatatttatggcaatcttcaagctgaaaatgctcgcaaattatttccatgttgttcttataacttggggtgtcaattttttttaaaacaatgtttaattaaaactcagacacttttaattaaaattccaagaagtaactagtttcccagaagtttctagtttcccagaaattctctgtggataacaaaacccctggaagtaactcttgggtctttggtattattcaaggcttcgttttgagccaggtcaataaatgcgaaactcacaatcttgaaatatcatttttacgaagctttagaaacctttgtgtagggtgtgtgtttgtgtgtgtgggttcagtaaaacatgtcaataaagcatatgtggaggacatgggacaacctcgagtgtcagatcttaccttccttacagagtctcctcttgttctatgctgcatttagcagcctaactgacttgcaagcttcctgcatggttcctgtttccacctcccatcttatcctcagatgagcacagggataacagacacacactaagatggccagctttccttgggtcctgggaattcaaactcaagtctttgtacttacatagcaatcacttgatccccctggaccatttctctagccctttgttcaagcaggcacttcactgagatttctgagcagccgtggaagagccataaccacagccctaactttgacttacttcgaaatcttttaatgtacttactgtaacattggtgttggtctgaactctcatctgtgagtaaagatgaaattgagttaggatctttaggaagaataagaaagctatggaaacacacaatctccctggtttgctctcacttgccatcttacctgctgagagaatttcctcctgacttcttcctcagattcacctaatgctgtcaagtaacacaactcagtttgcagggagcaagactttctcctctaccgttggtgctgagccatctcttggtgatattattatcattattattattattttgttccttccatatgcaaatacctcatttttagctattcatagcaacatttgttatcaaaagttagaaatgcaaaataatacagcaaggacaacagtggctaagtagagcaatagggacatggggacaatgtagaacaatacagcatgcttcatctgagacttctctttgagttactggatatctttaaagcattctgtttagtggccctctatgtaagcatctatgaatggtgtcctgggcactgagctaagtgtcagacatgtcctgtgcagagacctagtatgtagcagtgtctctcacaccctggattcatgatgattgctgccaaaatgaaggcaagcagctaaagtatcccagtgaggcagattcttcagcatgctcagatggtcatggtaagtggcttggaaatggcttctttgaagcaatgggctacatgaacaaaaaagtagggcagggagagctctggaattgtttttcattcaagccacagactgtctttcatcagaagagtgccaagaggccttccactaggggtcttatttctgcataggaaggtgttttatagcaggatagagcactgtggtttcctctttttactgcctgtggtggttttagtgtactcaactggaacaatctcctagaagatgggcacagctgagagggatatcctacattaaggtttgcctcctctgagaatgtacatgtgggattgtctttcctaggctaattgacttgtgatgacccaccttaaccaattcctgggcagggccagtccctgggtggggatgctggattacattaaattgcaaaagcaagtagcacagcagcattaattgttgtcttctgaaacctggcagctgttagcagctgcttcaagctcctgctgccttgactgcagcattggaatggactgtagcttcaaggtgagccagaagaaatctttccttccttaagtgcttctgcctggtggttcatttcaacaacaggaaaagaaactaagatacttccctgtatgcagtttcggtgggaacaacttaaagttattttcctttcttcatcaccttttttgcaggaattgctattaaagatatttccggtctgttaccaccaagaaaatccttagctctattcatcattcctcaagtaaagtctaaattatgtgtttatctattaaaaggtatttggagttattgatgactgctttttaaaagtgatcactgtgacctacacagggattcccgggattttctcccatgcttaaggaacataacatgcaaaacagtatttctgtctagtgtatcaaatcttaccatcattttaaagcagtctctttctcttcagacccactgtgtgcatgtgtatggtaggagtgtatggtgtatgtgtgtgtatggggggagagcaagaatgtgtatgtacggtatttgcaagtgtgtgtgcatgcttgtccatgtgcacccatggagggtaaaggaagacatcatgtgttccactctatcaccatacaccttacttccttaaaacagggtctctctctctctgaaccaaaactccacacattcagcaatgctggttggctggtaagcttccaggatctgcctgtctctaacgcccccccccccagcatcatagttgcagacacatgaggccacgtgtaatattttttatcatgtgatcatgcttgtatgacaagtgccatatccttgtcccttccagttacttctttccttccttttcccttcttttcttcctttatttttttctttctgttttaggatcctgtcatgttataagagactgagttgactttctgtgtggttgtgggtttcgatgtgctcaactgtaaacttctctgtggtgttggtttgcttgaggtatctatgaagcatcctagagaaagaaaccttactttctcataatcaaggactcttttacaatgacatcttggtccaatttttgaagatataaaggtccatattgagaagggaactaatgttcttagggaagaaagaaaaaaatggagaagggttttgtgtaaacagagaccagttctctgatctttttttttttaaaaaaaaaaaaaacatattaatagctagaatttgctgggttgtcacagtgaggctagcacatttgatgtattcagtcatttaaccagcacaacaatgtgggaaggaaagtttgttgctctggataagacctggggcctaaagacattaaatatcacatccagctaattctgtagtagattggagagcaaattttgtccacacatccaaagccactgactctctccacacatccaaacctactgactctgtccacacatctaaagctactgactctgtccacacaccaaagcccagtagccagaaggcccttccctaacaatctcatcatcccagctgtgatcttctggaaaactcggagcttagtgttacgaaaggactaaaaatgatttttgaaatgatgattatttctaatacatttttcttgtgtaaaaaagcccatcatgtggtagattttggggcgccccttttgagggccttaccctgcctggggagtggaggggggatggctaggggcaggtgggatgttgtgggggaggggagagggagaagggattgacatctgaagcaagcttgttcctaatttgaactaataaaataaaataaaaaacccatcattgtcttcagttaaaatgaactttgaatctttactctgtgtatttaatagcaagagggcatctcctgttttcacagtgaagaatataggacatgccaccacacgttcttctgaaatattcaggtttctacttcaatattgaatttgatcttcatattgtccatttatcccaatgtgaagacacaaggcccatgaagttccttattcagcatcccagaaaaccagggacactcgagacatttcgtctcctccaagtctactatcctcatagcatcttctattacgtggctggcatgtgttcagggttttatcttggaaaatatccagatcaatccttcacacggtggatgccacacgactcactattgcactcttgagaaacaatactaaatgcagcaatcaaacctcagcaatcaccccagggcttggtggtccctgtattttatattttaaataatactgaaacgttgttgtattttctgaagcatttgggtaatgcatagataaaaatccgggaagagggaagggagggcatgctttcaaattacctggctgttaaagactgttatcaatcctttctgagatgcggttatcaataaatccaactgtgggaccttcacaatgcatttgatcacatctcgtcttctactgcctgtcaaaagcacgtcattaatgtcaatttccagaggccctaaaactcatttgttattggtctaaaacaagaaaaagaaggcagccagcattttactagaagccccaagttcttagaacttagaataaaactataaaaaaacaatcctgcaactactgcttggtttttaattatccttagagacataatatgaatatagaactttttggctaaatatagcatatgaattcccaatcatcttgtaactccacaccccatcatccacccacatccctcacagcacacaccagacacacacacacacacagacatacacaaacacagacacacacacacacacaccagacacacacacacaccagacacacacacacacacacacaccagacacacacacacacagacacagacacacacacacacacacacaccagacacacacacacacacacacacacacacacaccagacacacacacacacacacacacaccactctgagcacatttcacagagaatgggctttctaaacatcatgtggaatcatttctactttgaggcttttcacatctcttagctgttttttctttaaagtgtcaccatcacggtctacacagactaaaatcctaacactatctcaggctttccatcatcaaagaatcaaactgctttaatgctatttgaaggcttctaaaaccattttgtacatttggggaaataacactagctactttgatgctcttgtgcctaccatcagaatgaaggacaaagctctacatgcaatacttctcagggtgagttaacttggtttttttttttttttttttttttggattttagtttgctatgtagctccaggctgatcttgacttcatgactttccccttgccccaactgctgggattacaggtgtgcaccatcatggtctgctcgtggtgatgtaatttttattattgcaaacacttagagaagaatggacatgagcagagtctgtactccaggtagcaggggcacacattagagagaataacagatgagtctggggagttatgtctgtttcttcacttcagtgtccccggcattcatgtatctgacccacactgtaggtactattccagctgagctgcatccccattcagagatgcacaggaacaccacactccacccagggtgctcccttcttctcagaacatggactgcaatgctgaaagacaggaaaaggctccgggctttacctcttcccctaacccttgcccaccctgggtgaaccaacaggaaagaaaacccaaagtgttgagggtgcagagggacaggagtacccaagtctcagggtcaatttgagggggaaaaaagattatacctggaagctggaaaggtcctaagatgagctaatgcctgtccatgaccagctcaaactcagtttcagaagaatcaagggtaccaggttgggaggagatttccttgggaagtcttcaagagtattgtaaaagataagcagttccttccagtgacactggaacacatgctcatagaatgtcatcacagagacttaacgggaggcccaagcctcttcacacgctgactcctttccctgttcacctttagtagttctttcagagtgagggtgaccttccagtttcagctgcagatagaatctctggaactgaacccaaactggtacttacgaggaactgatcgagtacacgaaacgaaaggcgattcttcagaaacaccatgctcccagagctcagctttgagaaaaatctgaaaattcatactaacttggaaaggaaatgtaaaagtcacctgaaatcacaattcgctgtttcctggacacaaggaaaaccaaattttcttcatccaaatgtgaagcaagagaatcttcatcagaggagaaatagccaaagatctaaaattcccaacagagtaaacacaaagagtatctcagaaatggctgccaagtaactacggattctgcactgggtaaattcaaagtctaactgagatgaaatgcactttgtttcctgatatcatagtagagagccccctggaaataagggacactttgacattcaacacacttgtcactgatgatgagtgatttccagggagggactgacatcttttccatgaagcaaccatgaaccaggctggtgtccttgctcagagtaaatgacctcttaccatcttgcccttgtttggaaatgaagtgatcagccagggcctcagccatgcatgttcaccatgaatgactgactattcctaaccatcatctatcagtcttgctgggtcaggttttttattctggcagagggatgtttcagaatataaaagatttcagatttgtttgattagctactacctactttccaggtgttaagtgaaagttagctaccttgctataagaagaaaatctggatataaaaagtgatcttttcaaataaactaccaaattgtggaagtttcaaaatcagaggcatttgaaaaaaatgttaacagctataagccaggcatagtgacacaagtctgtagtttcagttattgaaaggttgaggtaagaggtttgagaccagtttgaagccatcctggacagcacaggaaaagtctgtctcaaaatcaccagcaacaaaataactcctattaacttattaatgagcagaaataaatgttttcacctattaagaatttcaaaagaaattaggaatttcaaatgctgtgtgtatgtgtgtgtacatgtcattatcagtgtctttctctattttctgagacagggtctcttactgatgccagagctcacccatagctaagctgttggacaaagagctctggggatccacctgcttttagctgctaaccattactggggggggggggttagggttacagtgtgctctgctgctgtgctgattttgtgtggacgctagagactgaggtctggtctgcagctgactttgtgtggatgctggagactctgaggtctggtccccagctgactttgtgtggatgctggagactctgaggtcaggtcctcagctgagtttgtgtggatgctggagactctgaggtcaggtcctcagctgagtttgtgtggatgctggagactctgaggtcaggtcctcagctgagtttgtgtggatgctggagactctgaggtcaggtacccagctgagtttgtgtggatgctggagactctgaggtcaggttctcatgcttgtacagaagggggctcatcatcttggaacacaaataataaaaacataaagacagatattggtgttcaatcttcaagctgaagatcagaaaagaaaagcagctggccagtagctcttgcctctgccaagactgaaatggaggttctgtcttccttgactagaaactgaatcttttcctgtcctcattgtggctggagataattgctttgtgagaccctttggttcttccttttatacttctcaaatcccgggattaaaggcatgggatcccaagtgctgagatcttctttatgtgagctgtttctcttttagactggatcaatttcgtgtagctcagtgtggtcttgaactaacagagatccatctgcctgtctctgagtcctgggattaaaggtgtgtgccaccaccacctggctctatgactagctagtatggctgctgggcttaaaggttgtatcagcactgcctggctctatggcttgtagccagctttgctttctgtaccctcaggtaagccttaataaattataaataatataccaccacacccactgagccatctccccagcccaaccacctatcctcctgttttatttttttttctaatgctaccaaaacaaatggccacaaacatgtctttaaagaaggcttctttattaacccatactttcatagacttgagtccaaaatggatctcaatgggctccaatcaaagagatagtagaaatgtgtgttgggaagaatcagttctctgtcattcatgttggaggcatgaggttgatctgcctgttggctgtcaggtgacactgtctagatttcaggggcttctactcagccctagacctaagtccctccttctcagccacagcaggggagtttcaagtctcctccatgtttgggatccttcccctccctatcttgttttgaaggactttgaaccactaaaataaactaggataatcttctggcattaagctctcgtgattagtccctcaatccatcagcaaattcccatcacaattacctagaacggtgactgatggtgcaactggggaacaggactcctgagaaggagggtacttttacatgcccttgttttttataagcattcttcagcacaatcaataaatgtttggcagcctatgtaacctaagatagtaatgtaccatgataatgttcaggtcaaaaagtgaaatgacaatggggaccatgattcctctgtcccctgttaaataagtttcagcgtttcttggggttggagaattctacaagataaggctaattctaaaccaggtgctatgttttcagtaacttcaaatagtttacacacagccattcaccctgatgttttgtttctgcagtcattgtggagacggtgacagtgtctgatcagtgtctgagaagagatatgtgaagaactgtgggagcaatgccccccccacacccctgcaaagcagaatgacacactttgggactgggaaatcagttaatcctcattctactgtcagctggtcacatgatcgcaagcctgtgtcagttctctgtgcctgagttttccccatctggaaaatgatcatcaggaatggtcccccttaaatgaggacgtggatgattgtatttcttagtaattaggaagagtataatgtactcggattacaccaagtgccagacaggaattcaacatgtgaggaatggggcgctaggtttcctggaaccgtaaaggaaacagaacgtaggttcctttaactccttgccagttaaaaatcatccactaagtacctttgctgtctgagcattttgtcatacatatcctttagagagtcatagccatgtggatctacatatccatgtgacatttactcctgccaaaattaccaatttgacaagataggaaagtagaaaggtgaccagctgaaaggaagactcggatcagagaaagtgggagcagacaagaggcagaaatgggggaatggacatgatccagatatactatacaaatgtatgaaatgtcataatgaagcctactactatgtattattaatacatgataatacaaattttaaaataggcaaatgattttgctactttcacttatactaaacatattctcacattgtttgataacttctcaaggaatccaagtacatgaagtcattgaaaattacttgggaaaaattttagatgtaactggtaaacttcagaagaggtggcaaagctcattttgaaaggttatgtttcaaggagaaagttttatgatcaaagagaaacatcccttgtcatcttatgataagcagtagcctcaaggatctccagtttctgccttgaaattttaaatttcaggctaggagctgtaacatgatttgggtgcattgctggcctgagtactttatgactatcaagtacattataacaaacagcattcattttctcttaacaatgcaatttccagggattccccatgctttcatccattaaaaatcttttttgattacttaggtgacatatattcagtgtagaacatatgaagaaaatgaaaagcagatagattgaataaaaacttgcatgcagcttattttttaatctaccctagaacatcctttttacattttgaagttagcaaatataattttaactttataataactcactttaaatttaccttggggggcatgattggcaccccatgcagtatgattccaatttgagttagttcacagtgtgctcctaaaaatctgtttctatgttcctctcttgatttctcttcctgttgttgtgataaaatattctgacaaagcaatttaagagagcaggggcttgttttgtcttacatctccagcagtatatagtctatcgtggcaaggaagacatagcagcaagcagggaaggcgtggtggtaagagcagggagccagcagcttaccttgcagccaaactcagataagcagctaaacaagaagctagggaaggctgaaaaacgaaagcctccccaccccttcagtgactcagttccttccctaagtccacaacctttcaaaaacagtcccaccatgtggggatcaagtgttcaaaacaccctagcctacggaagacatttcatatataaactacagcagctacctattagcaacacaggactaacagggtggtattaaaaatgtagaccaggtctttgtaaatgtgaggcaatcacaccattcagattcctttatacctagtttttctcactatatattgcaggggcagacctagattatgctttcattagttctaagatttcactaaactaataatataaaattctccaagtgcacctgcatctaaacctcagaaaagtaaatcgtaactttttgtggcattgctgagacaaaaaagatttacatgttggaatcagatttgtatacttttgcctgatttttgaaggatgaatctaactcatacggcctgatcaatgactattaactcataagacactttataaaaaccagctaatcaatactgaaatgaagtgagtcttcatcagttaatattaaatttccattttacagatgacagatctggagcccagaaagattaagtcgcaggtcttgaaatagcaacgatccttgagggcagtgactcatggtggtgagaaaatggtagggcaatgaaggcagagctgcccgcacagattcctggagcctcaaccaactcacacgcacaaagtacttcagaggctgctcatgagagctgttctatcaaagctgaaaggttttaggagtccaaaaggataattgtatctgggattggagatggagaccaaagcccactttctgtgtggctttagaaacgtctttaacgcgctgggtttctctgttctcagcctcactgtggcaatagcggggctttctgcaatctgcatgtggatctgttgtgaggactaaatgggtacctgggatttacaaaaagaagattttacagatgtaagaagattgtgtatgactagaaggagcagatgtcacagagaacaagactctaattcctcctccccataactgaaaaaaaatgcagatttacttattttctccattacattcaaagattcttggttcctgtggctctccatgtgcagatctctcccagctggcacgatgtcctaacgttcggcatgtatggaacataaagagtcctgggtccctttacagtatgctatttgaagcttacattactgagacagcagttttggccagtaaaaatgtacaacaaatgcttcatgctaatatataaaaaatgtatccccttgaaattgaagaagtctattgatattgttttaggtgcatagtttctgagacccagggaggtaggagtggatctgggaggaactgggggagggataaatatgatcaaactgcattgcatacagttttcaaagattattggagatattattatataagaaaacaaggtgctaccccaaatcacaaatttggagtcttctaacagatgtggctggacaaggttgcttcatctttccattgtttgtccataaaaccctaaccttgatagtcagaaagaattcattctgttctcattttgacattttctgtggtgtccaatagaaatattgtataagatatatatatatatatatatatatatataatgttaaatcttatggtagttaatgaaacatgaataaagcaaaaattaaatcaactttatcagtgtattttatttaactcagcatgttgaaaacataatttcaacatataatcaatatttaaagtcaatatttaaagtggaatgctttgcatttttaagacaatacttttgaaatctgtatgtatattacacttacacttacggtacatctcagctcagacaaatcattcttccaacatttgacagccccatgaggccaagggcagctcttcagcatgcaggtctagagcatctaaggattcgtttcttagatgctatctttcctatgagggttcatgccattttattatatcctacactcactgacgatgagcccagtgtttcccattcttattctgaatgccctgatgtagtgtgtggttgtgtgtgaaccatccaggcagagagcacaagcacatctcagcccttggtgggctgggtctcctgtccttggtaaaatatataaaaggtttctttcagtgtatcctgagtccagttcactctaattttagcaacaccaacaataatgaatagtgcgtcccagaccgacaggacatcactgcacaaaattcagttaaccaagataaaaatctttaccaaaaaattgtatctcaaattctaagacatcttggaaacctggccacaaacacaggatgaaaatgtcaacattgtagcctctgctatgtcattcccaggaaagggagaattggagagcagaggggagataggaaaagaaagagaggagaggggaacttgacaatcagaattcttcatctttgatacttgagccttatgggtgattggtatttcctcccattgctattttctgctagattatatatttttagacatttcctaggcatatcaacctctgcatgtggctgtatgcaaccaaggatagctgtgaatgcagcccaaccccaaactgtaaacttacttcacacatgaacattttcctgccatttttgtaaccccattgtgtggtaagctttatagatagtgttgtctctaactgtcaaaagtttggacacgtctgagctgttttagtcagaggcatgatgttaaagtatgttccggggatataaactcagtgtttgcccagtggatactttcctccactgaggcatctcctcacccctcatatttctattggacagcacagaaaatgtcatcatagaaagaaaacaaattccttccgatcatcaaaagacaggtttttacctacaaacaacagaaagagcaagagacctttggttatcacagttgagcaaagaactaagttaaaataatgtttcagttcttgaaaaaaaaaaaagagaactgaacatgctttgggaacttaccgaatggcagaatctttgccattagtctgtagctagccaagctttgtaggtattcacaagcctcagtgggaaaggttcccaatttgcaggagatcttttgtgagttttattgtcaaggcttttatgagatttgttacatgatcattaagggtagatacaaactttctcattaatgttttgaatgccttaatgtagctgtcccattctacctgagccttctatgcagggttgagtatcagaaccccctttctttcacctttgcttaataggccaggagtatttataagaacgagaaaaaaagtagatgcattgaaactcagttactggaatgttggggtattgttttttgttttgttttgttttgtttttagatagcaagggggtaaatcttgtcagcaacctgtgaacttagactcattctttcccagagggtcctccagatgagactacagcctagctaactgctggctgcagctttatgaggcttcaaatgagaacttcccaggaccattttccagactccttgtcaatggaaactatgacataatattgctaaatgtatagttgttcattctaagcagacaagtgggaatacaaagaaaaatagaaaaaaaaaaagaacaggcttctttatcagttaatttcctttaatttttactgctttgtaattcctttaaaagtaggggcagctgctggatttttaccaattaccttccttatttttattttactgaatcttaaagattctgaaaagggggcaggtagtaaatagtgaggctcacaagccattagctgtctgtcagggctgttcatccttgctagtgtgtctcaggaacacctgtagagtgtgtgcaaatgactgggcctagctgtgcccaaggagctgattataaaatctgcatgtgtccagctttggccttgggctttggtttgctgccctctgttaaggttacagcattttcccccttaaattgttaaaatatatctgtggctttactcagaaaaaatttgagtgtactcctggaattaacttttaaatgttatttaaaaattcagcatttctgttcataatttatatttgctatttggtttctttgttcaactctgctattttagcctcataaaatgattttgatagctgttgcaagtttttagcatattagtaaaatactcatgggaattatattctcttaagggttatagaaacttttggtttttaatgtttcctaagttaattagtaatttttgctttagcaggttttgggatttgggctgtgaagaaatttcccagaaattatattctggggaaagggaaaagctggacccctgatgacaagcagaggcacctgcctcctaggaagagattttacagttctgacaaattgttggatgacctcacaggacagactggccttagactgtgataggctggaccataccttgacaagaactgctcagttataaatccctcttgccttctactgagacttaatctgcatatcagtactcctaaacacttgggggtcactggacccctgttgtcctctttccaatgtggccactgtacataaaccttctttctctgttcttcatgatcagttatctctttaattgacatgttggggatgggcagttgaccctagcatcttcaggctgctagaagccaggcttggatgtcaacaactctggtgatattgttaaatgtgacagccaaatactcaaaaccaccacgttttctcttgtctatgatatctactcatttctgagagtgacccagatgttttaattacctgcatgtttgtaatttttgcatcaatattctgccagtcagaaaacattccaagaactgacagaagagaccaactaaaccaacctcttatgttgataatttgaacacactgaaaatgtacacacacactactgactgaaaaatgtttcattgtcaaatgcaaaaaaaaaaagcagttaaaatcttgattgttgttaaatggcacagacagttcaagttgctggattcatttaaaagtcttaaaagttactcattgagatcaagcatggtagtgcatagctttaatttcagcacttaggaggcaaagtaggaaactatgagttcaaggccagcctggtctacacagtgagtactaggtcagctggggctatatagtgacttaaaaaaaaaaaaaaggaaaaaaaatcatggactatggttaaatagatgcctgttttcttcactttcttgtgaactatggctaagtcttagcggctgtagatacagcaatagtctgtgtacacattgtatatttaactttgttgggagtaatactgtttcaattgtttgttctggacaaagtcaaataagactggggttttgaattatgtgcgcgcaaagcaggtacctcacaccagtcgaaagatgcatcaggattgttgcagagtttcctgtaaaaacacttcacatcttgatttttcacttcagggccaaagatctgctgcactgaggcataaaacttctcgtaatcaattgcttctgcagtggggaaagtacaggaacattgccgtcatattccaagggcagagcttcacactccatgtacactccccaccctcgaggctcatctcagcccataaaaccgactgtaagggaaccttaaagatcttatctttgggaaaataactaggccatgactagattattattcaggcagaaggaatctttattttggtgtttaggattctcttctgtctcagctattttagaaatcgtgtgcatgaatacaaagataagaaagtcacgttttcttactgtgaacacatttactagttggaatcttcattagaatttatcttagatttgtgcacagagcaattattggtaatatgagattatgtaaatacacacagacagacagacagacagacagaaatacacacacacacacacacacacacacacacacacacaattacttgaatcttgatttttgccaagtttatcaatatctttgggtaggattactaaaatctcaagaaagagttagataaaagaattactcaaactgtataaacaaaatcttattactttatttaactaacaaaaatatgttttatattgagaaatactctagcttagttatgtgtgagcacttagctagacattggacataaaatgaaaaactatataggaaatgtttactgacatttccacaacagaaaaagagagacccctgtattaacattctataagactcaggtgaacttcaattattgtgatgagtgggaatactgcaggcccgaatccaaattaactggggctttagtccactaaatagccacttactgtgcagctctgtttgtgatttcgttgttactattagtaaatccttttggaatgtatgaacagaacctctactaacacaaaagctaagaatgtcaacaggtgacatctgaagcccatatcagaggtttctcactttgttttaaccacccacttggtgttcccattggtgtatttgaaagacaactttacttcatgaaactgttaccttgaaacatagtgtttggaatagcccaaatcattctccataggtcatttgactctagaacaaactattattctctataacatgagggatttatcctagagatgcagggatggttcaacataagttacttaatatatgtagtaaatcatataaatggacttaaagacaaaagtgacctgatcctctcaatagctaaagaaaaggcttttgacaaaacccaacatgccttcagggtaacagccctagagggagcatacttcaacataaaaatgctatatgtgacaaccccagagctaacattgtcctgaatggagaaaattttgaagcaatcctactaaaactaggaatgagagggctgtccactatcccccttcttttcaatatagtgagcactagctagagaaataaagggaacacagagaaattaaagggatataagtaggaaaataagtagtcaaattatccttatttgcaaattatatgttataataagagatcccaaaactttcactagaaaacattattttttttaaaaaagtagcaggctacaaatcaacttacaaaaaatagtaagtacccttcctataagccaatggtgaacatgcaaagaaagagatcccagaaacactcctagttgcaatagcctcaggaactatctaggactgaacctgatacattttagtctccaaagacagagactgaaagttggaaagagatcccatgcccgtggtttgtagaactactgtgaaaaatgatcatctgacccaaatcaattacagcagcattcctcacagaattaaaatgaaccgttcctaaattcatatggaggcacaaaagacctgaatagacaaagcaattctgaacaatactgcatgaatcattgtaccagagctcaagctatatattacagagctacagtaattcaaagagcattgtgctggcaccaatatacctatgtagcttaatgggagaaaataaaagatccaaacgtgagtgtttgtaattacacccttctgaccctttaccaagatgtcaaaaataaatattgggagaaagcatcttcataaagttgtgctgaggaaagtgggtgcccttaactagaagaatgaaagtagacccatatgtatcgccttgcacaaaactaacttcgagtggatccaatacctaaatgtgaaacctgaaaccctaagactgctagaagaagatataggcaacgccctacaagactcaggtgcaagaagggatgttacaaatagaactccatttgctcaggaattagggccaacaaatgggaccttcataaaaccaaaaatctatactgcaaaggaaacaattgtgtgaagaagcagcccacagaataggagatgattttgtcagtgatgcatctgacagagaattaatatccagaatacacaaagaactccaaaaatgaagaatcatgtaaacaaatgtcccagtagaaaaattacctatggatctgaacagagaattctcaaaagaagcaatgaaaattactaagaaatatttttaaaagtgttcagcatccatggcaatcacagaaatggaaaatgtaaaactactctgagatttcatatcactccagtcagaatgactaagatcaagaaaataactgacaagtgctgaaagagctactggaagctggggcgggggcgggggtggcatttaggggtcagataaaaacctggcacaagggaatctcccatgggatcatcccaagggatgaccccagatgagattcctagcaataacagacacctagcctgaactgtgtccagattatgtagttattttaaagacacatgttctatcttaaatgcacctgggtgggcggtgggggtgggacttgctcacagggtgatgtgaattctattaggtcttcagtgagctctaagagtaacataatcaggacagatctctgcagtctacttctcccccctctgaggcagacacctctccattgaaacactcttagcgcctttcctaccatacaaagttaacccttgtcttcctgtatctattaataaatacaaacgtatttggatagtattagcagcttggcacaagttagggtcccatctccccactcagtagatcttgtccctcagacacaaaaggccatttgtctaggagattagtttttatctaatcttaagaaccctagaggaaggaactttgtaccacagacctggggttgcagggttttagaagaaagcaatgccagcttgtttgtttaatgtgtgtttaaggcgcatctcctgacaccaggctttgagccggccttacctttgcaaaatcttgaaaacacttacaggccaatggtcagggagtgagaacatatcaatgtcagcaggctaaataaagcaggcaaattcccagagacagcaataaatgcagtaagaatgctgaggaaggctttgcttgggggaagtttgggagtgtctgcaaagaggtggcattctattttctcaaaattgaaggtgagagggactggagagttattcaaattgggagaatggcagatataattggtcacagaaagtacagcaaaagaaacaatttgataactgttgatgcaaatcatggctcttatctcaaagggaatagaactttattttgagccaggtatgagtgagcatagcttgggaatagattcaagttgccctgtggaagtggttagctttcatagtcacagaacaaaagcaagtcctaagtcaaagcatttctccaatacattgaagggaatgtcaaagtggacaaagccctgctgcaggtttagatgctctctgcagactttctgctttgggtttggtgaaaatcggtgctctgcttatataatcctgtgtgagaggaaaggatagtgattcccaggtggttagtcaagaagttctaactagtcaaccagccttatgggattttttgtttgtgtttttttgagacagggtttctctttgtagctttggagcctatcctggcagtcgctctggagaccaggctggccttgaacacacagagatctgcctgcctctgcctcctgagtgctgggattaaaggcgtgtgccaccaacgctctgtggaatttttaacagatttgtcttttatcttttttctgagaaggtctgttcagggatggggatgcacttcccttgctacagtttcagttcacagagtaaataactaaacagtttttaaaactgtgacatgattagagatgctgaaaagggtctgacaggattgaaggtgccagaagctgacactggaaaggcaggttgaggcatggctgatgaatggctctgcacaccaaatcaacgtgtaaggattttaaagatgggttagtaaaccagggatatgacagactcatgtgtgtttttgttattaaagaaaaaaactctctggagaaatatacaggaaggaataagtttttggcaggaagattaacagtaggtgttgtaaggatgacccgagacaaccatcatgacatactcaaagatactaagatacatgacttaggagactaggcagctggcatgcatgccataggacttagtcaagaggatactaggcaagaaatcagaaagaaaaaagaaaattagaatgagaaatgtacaaaatcagaagagagtggcagggagacacatagcaaaagaaggtgcttctcaacacaaaggcagaacccagtgttaatgcagtgagatggtcatgcttgctgcaaaaaggggaaactaagtcagacatggaggaggaggaggaggaggaggaggaggaggaggaggaggaggaggagaaacccaacttactgaatttggcagccatattaggtactgaatatattttcagcaaagtggaggaaacaagactggaatagatgagaagggaggcagcgatactgggggaaatttagcagaaaaacaaagagacacagagtgatagcttaaggaaagagacagtcaaggacacgatgccagagtctatttttagactcacaagataaagtcagtggaaagagatttttgagattgttacagcaaattgatggtgttggagaggagggggatggatgctgtttggggaagagggtatagagggcagggagagtgagtagattcctggctttgtacctggcttgctcctgtgataggaaacttggctgagaggagcagaaatcccatcaaggattcagaaacatggtgagggtttggagaatcaattacagctggaggaaaaacaagctgactggagggaaacgaaaactttgtcgcacagtttgagggcccagccaagagcatggatctggagagcatcctaaaatgcctgagccctgcagacatttaaatgactggggcaggtgagtcctctctgtcttccattgtcttctcaagcaaagtagacttaactacagtattatctgttcatgctgtcatgccaatcaaatgaacttgtgctcattcaactgacctgtaaattaggaaatactactactgtttgagcaatacctctttgagtctgaccacttaggtcaagagtttcatttacatgggactgtgcatcccagcacttataagctgtgtatgtagctgtctatgcttctccttttattataacacctagacttattctgttggatttattctactgttatgcaattttattcttcattgacgtcttaacactcccaaactactcactctactgctcccctggctatatcatacttttagatttcactcttcttctcaaacccccaaatgactacatcctccacatggcccttccttcagcacattcaaataatccctgactacagagtgggccacagactgaaatcacagtgaaacaggaaactgtgagttgtctagaaacgtccttatggtctcatgatgctcccaggtgaaaaggtgggagggtggataccttggtttggatatgtattccccaaagactcagttatactaaaagcttgggcaacatgctttaacaatattgggtagtgaaggaacctttggaaggcaggggtagtgggaggaagttaggttattgggtacatgcccttgaaggagctattggaaccctggtctcttcctgtcttttccagcttccatatggtgaacagctttcatcacacggccccatcataatgtactcttaccataggccacacagcatcaggccatccggctatgtttcagaacctccaaaattcttttttcttcttgagttgattatttaggacatttcattacagtgctggcaggctgggtaacacagagacacagagggcctccctcatggtcaccgtgctatacagaatctcgggtcagccagtgactgatagtgtctgcaaaagaaccccttaaagtgtaatgtaatccacttctctgtattgcagatagaaaaggtatgttagagacagagaatgaactcgagtcccctgccccaattcagtgtcttagcttcaaaacaagacttctgttctctgatgacctaaagcatttcccagttctaatcagcaactccagatggacttccctgtaatcatccatcttaccttctttggggataaacaagcctgctctttcttcctttttttggattgttgtcttttcaaccaatttatcgaaatcaaccaaggctgctttgaaactgttaatctgcagtgcaaggctgaactgcctgtcatctctggaatccatacagacatacagaacctcttatttcttcacagaaataatgctgtgaatttgcaaatgttgaaaagcttctagttcttccagcgcctctctgccgtctcaacttttgccctaggtctcattccttccatttcaaattcccatcccatgggaataagaagtaagtgttgcccgtaggatgttagcagaaggaaagctgaggcctgctgcatttcaaagagacaggggtgttagagaggggccctgacctcataatgtcagcattttccttcatgtggacctcattacatcacagtagctctgtaagtttcacagaagattgaaatcacctactgaagtgtgtgtgtgtgtgtgtgtgtgtgtgtgtgtgagagagagagagagagagagagagaggctgtatatgagtgtgtgtgtgtctgtgtgtgtgtgtgtgtgtgagagagagagagagagaggggggctgtatatgagtgtgtgtgtgtgtgtgaagagagagagagaggagagagagagagagagagagagagagagagagggaaagagagagagagagtatgtgtctgtccattgagatgaagatgaataaagaccaatgactttcctcaaaatgaatgtctcttttcactgtcaacttcctgtctcccttatggtactagagagaggaacattcacatttgttcccacggctctcctggatgtggaaattccaacttgtgaggatgaaaatgtatttcatcacctctcttatttggcacaaatgaatttatttttagaaaacgtggagaagaaaaatgtgtcttttctctttgttcatttaccttgaattaaaatactaaaaggagctgtggatgaggaagtcatccttgtggggacagtttttccagaggagtcagttgaaggagaggaggcctttctgatcgcctttgccttcaacactaacatctaataccactgagtccaactgtttacttctgactcaggttttccagtctccaagtttgtgtgtgtgtgtgtgtgtgtgtgtgtgtgtgtgtgtgtgtgtgcgcgtgcgcgcgcacgcgcgcgcacatgtgtttgcttctgtgaatgtgtttgccggtatgtgtacccaagaagacctgaggatgataatggacattttccttaatcactctccaacttagtttttggcataggatggccctgaatctagagctgttttggctgtgttggctggccattgagccctaagggttcctgtgtctctgtgtgcccagcactggcatcacaggtgtctaacccacagtgcctatcttattatgtgggtgctggtggggatctcctctggtcttcatacttgtgtcgcaaattctttgtcaactgagatagctctccagctttttaggaaagtgccttctgtctgctcacccatcaccaattaaattatagaagtttgggtgagacaggtgaggtctccattccttggtaatcgctctcttaaatcttcttgtgaaactttgagtccagaatccaaacaaatggcattaggagcacttccattttgagtcctaggtcaactcttggaatccatctctgactatgagctattaggggagtaatctctataaacatgttaatagagaatcctgtcactctttttcttctttaaagctctcaaaatactatttggcaatatccaaggaactatctttcctacaattctcaatcatgaattcttatattcatttatccattcatccagcatgtatttatggaacacccattttatgctagggggtgttttaggcagtaatgataacatattgagcaaaacagtaccttgaacttacaacctaacagagtaaacagatacatatgtagtatgccagaagaaggcaaatgctcagaagacagagtaaaggtgtatgcactgggatgtatagagaagcccaaagaaaagaaatcatactaacaaaaagatatttggcagaagcctgcaggggaggtagcaagccatgtggttaaatggcaagaggatgttccagggaaccatagggataatgtcctgacattagtgcgtgcttgacacacccaagaaacaacacacttcagcagcacacaggtgtgtaggaagagaaagagccacaggctggtggccagatccagtaagaccacagaggtattataaaaactttggcttttcctctgagagaaatggagagggccggagaagaacactcacatgttctgacttgtcagtaaaaagggttcttccaaataactttgtaaaaagtaagcgagaaagggaaagtgggagaagtggagagaccagtgtgtgcagcagtttttgaataatccatgcaagagatggcagaagttcagaaggtatgtggactatagttaggttttctacaatcaaactaacacattacaattcttacaaaatggttagaaatcagaatgctgccaaggttattggtgacattaaaaaattatttgtggaagtagttaagagtagatagccttcttccagatgactagcgctcaacatcaggcaactcacaactgcctgaaattccagctccaggaatccaacactgccttctgtcttccatgggcacctgcacacaatggacatatgcacacacatatagattaaaaaataaatgtttttaaatgacactgttgctcactatattagacgttatatttttctgttgcattggtcttagtccattcctgctgccacactaaaatacatcacactgagtaatttgcaaaaatcagtacttcatttcctactgttctgaagattgggaacaatgtgaggctccagcagtagctagtaaatgcccattcctcatatggggcattttcttattattacatggtagaagaatgctttttatgataaacaccatggccaatagcaacttggagaagaaagggtttaattcatcttatagtttcacatcacagttcatcagtgaaggaagtcagggcaggaactcaagcaggatccatggaggaacactgcctactggcttgctctttgtgttttgctcaacctgcttttttatacaacccaggactagaccctcccacatctacagttaataataacaataacatgccccacaggctttcctgcaggccagtctagtgaggtattttctcaatggatgtttcttatttccaaaagcttgtgtcaagtagaaaacaaaaagcaacaactaatgaagatgagggcagggtagcagccggttgttttaaatttcagttaccaaggccaaaaccagctccaggaataagtcaaggaagaactctcctgaggaagaatgagtgttggcatgtgatacctgtgactcctgcaccgtgcacagtcctgacggaccaggcactgctaggcttggctgagtcactttggagatgttctactggggaatactgcctgatttgttttgggacccatgtccaaagatggcactataatagtgccaccagatagggaacaagtattaaagcacacaatactatgggaaattttcataaggcagataaattagcaaagagaaaagatatgtgcccttttttgggcaactctgcattgaacagggctgtgccaaggtaggcacgcatgcaccaaggtgggcttgggtcccacaaatgtcttgttcgtaagttcaatacagagctctccaggtaagggcacctttctcttctctttcctattttctccgccttataatcacttatggcatctgacatcttatatatgaaccagtttgattattattatcatatctcccaacaccacaagaaagtgggttttatgagaaaaagattcttcacctaagaatgaatgctggtgggggggaatcagaagtctctctttctctctctctctctctctctctctctctctctctctcgctctgtttctttctttctttccttcctccgttccttcaactaacatccacatcttactgtagatgatgaaactgtactatgatgaaaacacaatggattaagaaaaagactcattagatggtcctatgtctaaaatacaaaattaaaaacgtttttcagggcaggtgagttcaaaggttttgtcgtagatgctgacaccgggttagaagtcttaaaaaaaagatcaagatttctaggaccaaacacactgccaactggctaagtgttcactgcagtggggtacggagctgtctattcacctagctgattcttggagaatttggagatgcactgaaactaacaaacgtgggaggagtgaacacttactgcacatcaatttagcttccacagagcaatcattagtgcccatgacagtttcaggtgcagcccaggacatcctcctcctgtgggtagttctcagagacagagaacatagccctaaagaagtgtatcgcgttcacattctatatttgacttgtactatattttcattgctgctggggaaaggtccaatggaaaatgcgtgctattctaaatatatcctctctatacctgctagatttagatcgaagcctgggggcactgctcacgaggtcacctgcagtgaagctcttaggctggcttgtgtgtcagggtacccctgcagcagagagagacaggaagggcttgactagggtgccattccttatcatagaactctgagagacgcaggtgtgccacctctttccacttcggcatactgtcataaaccctgggacatattttccagttctagagtagttaagcctcagccagctgtttttttctttttctttttttgttgtttttaaacctgtttccttgtttgtaaaattgtttggctagcaccctaccccgctcatttcagtgttcagttctctttctgttgggtaaatgaggtggggtgggtgttgtagcttccctcccaggaaagggagaatcctaactgggagtatttcattcagcacactacagagttgaagcgcaggcgttcataaatatttatgaatgaatgtgtgcaagggtgagtgactgaacgggtgaatggatatgatgctttcgagccaattgaggagaaatggaccgtgaggacccgctgaggctgatttacctccgtaaaggaatctacttccctttcttctgttccttctcttccggcttccaccacagctcacaggcagagcaagacctgactggaccctgggactcgcctacgctgggcgcagacgcaagcaggaggtgggagggggaaagggcgggccgctaggacagcagggaggagccacaactcagagggcggagtcagtggggtcctgggggcgtgcccatgtgcagggggcggggccaagggtgcgagccatagggcgggataccagggtgtttcggagggaggagtcgcactcgggacagaggagcctaaggagggcggggtcaagaaggttgcgtgtgggtggggccgcagaccgggagggcgtggccttcagggcggtccagtgggcggggtcgcaagtgctctctggtagggcgcaggcctcacgcgggagggcgggatcgctggcaaggcggagcttcacgtgtcggggcggggctttgtcactggagggcggggctcgggcgcgcgcgggttgggcgggcccggcgcggcaccggggcacaatggccttagcggccggctgagtgcgagctccgcccggttcgcccgcgccgccgcccagctcaccgagccctcgcccgcaccgcgcgccggcgtcgggccatgtactcggggaaccgcagcggcggccagggcttctgggaggacggggcgggcgccgagggcgcagcgccggcgggcacgcggagcccggcgccgatcttcagccccaccgcgtacgagcgcctggcactggtgctcggcggcctcgcgctgctgggcgtcggcggcaacctgctggttctgctgctctactccaagttcccgcggctgcgcacgcccacccacctcttcctggtcaacctcagcctgggcgacctgctggtgtccctgttcggagtcaccttcaccttcgcgtcgtgcctgcggaacggctgggtgtgggacgctgtgggctgcgcgtgggacgggtttagcggcagcctcttcggtgagtcgcccgggacgcgtcctcctcgcctcccaactttccctgggtacatcagccccgggccagccatcacccctgactcccggtctctcgtcccccggatcctcccttccagcctatcttctcctcccaactccctgtttccctcctcctcggggtacttccagccagtcatcatccccagctcccaatgcagctatagcagttctgaaagtctccctaccgctggccagcttgtatcttctcatttctgttctgttctacttcctagtgtaagctcaacagggcattttcacagtgggctttacacaagggagagagaaatgagggcctgtagagtccaagagatgcatgaaaaaagtcaactcctgaaaagtggagaagggggaaaggagagatttcttttaatatctaattagtatttgtttctcaaagtgacacatagaagcacaaataacggtgtatgtttccccctttcatttgctagcaattttaaaccgttgaatgcttccaagggagtgagaccgcatgacactttaattgtatttcctctacatggattctgtcacaccagaggttacaaatggctcagaagtccaactcactggtgtgactaagtaattagctgggcagtcagtacatttaattaaagtagaacttgttgatttcttgaagatttatattgagaattgacaggttagagcttgactaactgagtattctaggcttgggaaagtgtgtgtgtgtgtgtgtgtgtgtgtgtgtgtgtgtgtgtgtgtttggtattcgtgtggagggtgtaggctgtgttgtgtgtatttgtgtgtcctaagaattttgtttgtacagagatttgaaatagaaatgggtatttcttaagtcttaaagtcccctttccaaacctcgaaacacactaataatttattgttgtctttattttggcagatcttagagaaaagcatctatgtaatatcatggatatttttatttgccaacttatgtgtgacaaacctaaatctcatgttatttgtcatgattcctttttttttaagttaaagaaaaaaattgggagtttagtctcttctcctagtaaacattagccaaggatttcctttatacaaaaatactgaaccttgaggaggggctgtataaggatgtaaatggaaatgtagcttggctatatgattattctctgtgttagagaattattctctgtgttagaaatgttagtcgggagggtttggggctgaatcatctttaaagaaggtctagcttacagaatccctggggtaggcgacaggtgttcacagaaataaaagttctttttttctgtaaaacactgttctgtgctgtggtgatcaactgggagtatgaaaacaaaaatgagttgaatttttgtttgttttttgtaagggtttgcagcatccaccctgttttacccctcttgctctgtcagcctcatcttccagtcctttcttccctgttccccctgctgggagccatccttatcagaagaaaaaaaaatttttttttttttttttttcccgagacagggtttctctgtggttttggaggctgtcctggaactagctcttgtagaccaggctggtctcgaactcacagagatccacctgcctctacctccccagggctgggattaaaggcatgcgacatcaacgtccagcccagaagaaaatttttaaggcctctagaaacaccaccctggtgttttacctgagggagggctcctttactcaggacgtttattagtgctttcaatcatggcattactcccatcctaaagcctgaggcagatcttctgggcttacaggattggaaatcagttaactcttggagacaggaatgatgttactgcagaactcacaatgttcttagcaaagataacttctccctgagtgtgcttcttgagtagggttgagtagggttaaggctggagtaagggagacttcctttccatccctaagccaggactaatcaagcctgagtactaaaggagaggaaagttttaaatgctagaagtggctagctgctagctccagagctttggtgtggctgccaccactggtcttgttgggggcctatggctacttgattttctgcgttttccccaagtcatccactctcccaggctgcaagttttcccatctttgttatccactattgagctgactgtgtttaaggtcatctatcccatttgctttgacatccttaggttagaaagtacctatacttagtgcttataacctgcttcctgccccactggccccactgccagcctcagcctagaggaagtgaatacatgtttacactttagtcctcatagattctgtctccctctttacaacctgttagaagaagggcgagtaagtaattcacctattcttacatatttacacaagtagactaagcaattgcttcattctgggctctcatcctggcttctcaaagaaagctaaaaataagtagaatccctgataatcttggtccgaggtttctaccagctgggcttgttaggatcactgtttcagttaaactgacaggtcggaccagctacttagtgaagttcgtgtaaattccatttgtatggcttgtttcgtaaatatcagaagtatcattctcttaggtgtacctgtatctagaggtcagcagatttaacggtagtgaaaagtagaggccaaggaacacttgctgctgctatgcatggtgagccataaaaggctggcagtggggtgtgtgagtgtgccagcctgccgacttccaggtgagtatgtccaagggaacagcctccagccacacccagcatcacatggagatagccagcatgtgatgggaggggacaggagagtcctttcccatttcttctttagaaatgaaaacatgtttagagagagattcgtagttgcagagacagtctggcaaaatgtaaatgtctcctcacttaggtgttatgaatagatgttatttatattgaaatggtttaatacaggaaaccaagaactttaacttacacatgtactttgacacagaaaatgttacaaaactgtttcccctcaggcctgttcttttacatacctacatacattaaatgccagttattgaattaattctcttgtaatgtctggatgtctcatgtatctcctgcaagatccttagggtagttcaggatgtaaaatctcctatgcagctgtctggggttacccgcaaatgttcctgaccacagaaatatctgccattatgttgacatgctcactcagcatagtatgtttgcataaacacagtaaagccacatatctcttttagtctaagctcacagtattgtccagatacataattaacaatcaaataattgtataatttttttattttttgtgggatattgtgtccatgccttatgacagtattgctgggctgtggggagagaatatattaaatatcttttgttcattttcaagaactaagaagacctatgggaaagcatttaatgacttctttgggtagaggtttgtagccacgttaacaagtcagactccggtggattgaaactgctgttgcatgaaattgcttttatattatttatcattgtgttcttttcttgaattttcttctttcagaggagagttccagtcacaaatgcacatgtgatgcatggtaacatttcccgctaaggtgaaatgcagaaatgaaaaggacgcatccatttgagtattctcacatacgattacatgcattatcgtgttttccatgctactgactttttttttaatgtttaaaaattgttaagcgttaaacagcttaggatttgcaaactcagtgttcctgattgaagatcccaagtagagattttattacagcataaatacctcagaggagccctcgacctagttccatacagagttctttcatcagctgtgacctgaagtttcagctcctaggatggcagacaagcttcccacagagtttgatgtagttattatagggacaggtttgcctgagtccatcctggcagctgcgtgttccagaagtggacagcgagttctgcatgttgactccagaagttactatggagggaattgggcaagtttcagctttacaggcttgctgtcctggctgaaggactatgaacagaaccatgacagcgaggaagacatgactgcctcgtggcaagacctgatccatgaaacggaagacgccatcgctctttgcaagaaagatgagactattgagaacacagaagtcttctgttacgccagtcaagatgatggggacagcactcaagagaacaatgctctgcagagaagtccttccccaaaggcatctgctaccctggctgactctctggattctgcaggtttgcccaaagaagggtacacagtatacttttcaagccacgaagcaccttctagacacacagagagaagtgatacggagccgtcaccatccttaactgatgcagagaactcactggatcaagaaaaggatggtggcatccagacagtttcagatggagataaagatgaagacaaacctgatatagaagacaacagcaaacaaccaaagagaaacaggattacttaccctcaaatgattaaggagagccggagatttaatattgacttggtatcgaagctgctgtattctcaaggatcattgattgatcttctcatcaaatcaaacgttagtcgttacgcagaatttaagaatgtcactaggatccttgcgtttcgggacgggaaggtagagcaggtgccttgctgcagagcagatgtctttagtagtaaagcgctcaccgtggttgagaagagaatgctaatgaaattcctcacattctgtttagactatgaacagcattctgatgaataccaagacttcaaacaatgcccattttctgagtacctaaaaactaaaaagttaacgcccaacctccaacatttcatactacactcaattgcaatgacatcagaaccatcctgcactacgttagatggtcttaaagcaacaaaaacctttcttcagtgtcttggacggtttggcaacactccctttatatttcctttatatggccaaggagaaatcccccagtgtttctgcaggatgtgtgcagtgtttggtggaatctattgtcttcgccataaagtccaatgccttgtagttgataaagactctggaagatgtaaaggggtcattgaccactttggtcagagaataagtgccaactactttattgtggaggacagttacctttctaaggaaacctgttcaaatgtgcaatataagcagatctcgagggctgtgcttatcacagatcagtccatcctaaagacagattcagaccatcaaatttccattctggtagtgcctccactagagcctggaagcagctcaattcgggtcatggagttatgctcatcaaccatgacgtgcatgaaggacagctatctggtccacctgacctgtgtttcttcaaaaacagcccgagaagacttggaaccagtagttaagcagttattcattccttttgcagaagcagaaacagatgaggaagaactcagaaaaccaagactcttgtgggccctttattttaatatgagagattcctcaggagtgagccgaagctcataccatggtttaccttccaatgtgtacatctgctctgggcctgactgtggactggggaatgagcatgccgttaagcaagcggaaacactgttccaggagatctttcccagtgaagagttctgccctcctccaccaaatccagaagacattatctttgaaggtgagggttagcaagcagacatcctggagtcagtaacacacttaccatccagctagacaccccaaggacacagcaaggacttgtaaagcacagaacaccttcgaaattaaaactgactggaagtattttcatcctggtctcacaatattgtcactgaaagacagctgccatttgtgataagcgctgttcacatgtcttcaacaccaagacactgggtaccctaatagctctgctaatctgtcagcatctggtttgtggtgactcacctttttcagaattggctacaggaatccagaatctctgaatgtcattagctttattttacttttgggtttcacattagcgacattgcttaacttaaggtagcatcgtcttctgtgttctgtgttcaggttttatcattatctacacaaaaattaatatccacagagtgctactactgttgctaccacctcgggtgcacagaggaacacataatcataaacggagtgagttttttgtatattatgtaaacacacagggctggtagtaggagtagcagctaatacaagtatggtaaaaaagcaagtgttagaagcttggccatgcatgagcctgtggcttggggctgctatttacatgtgatttcacctgctttaacctttgtcactgaggaggcagtgagactacgctagcctgctactttacaaaaaaaagtgccccttagtcgtttgaagaacctcttatttacgagatgtattgcaatctgggtatggttgcttattcatgtaatgctaacattcaggaggttgagacaggaggattgctgtaaaatccaggccagtctgggctactgtgtcgaaactcatttcaaaacaaaaccaaccccactacctaccaaaaaaagaagtatattgtaaagaaaattaaagggacaaatttattcagaaaatttctatagagctgactaatacttaaaagaactaacaattaactcaggctaacataaattaataagtgaccctagaaaaaggtattttaggataagtgtttagaaatttccagaaaggaatcccaaggaaagaatagtggtgcatcttgatgtgggaattatagatgcctttaagttacagatttccccattccggcttctcagagtgaaacaggacacctgattagctttaaggaacactgtaactgacagagtgcatcacttccgctacacgtagaatgggaagctttggctacagagccacctgaccacctgcagtgtccccgcagtaaaagccctctactgtgagaagaggcacagtgtgtcagcagattacagtgtggtctgaatatccgctagtatatgcccttcagtgagagaaatgaggtaagacatttcaatgaatgccagtgtgctgagaatagaaagccatccattggtcccggtgttttttaatataataatccataatattgtatagatcttaaggattaaatatagcagaacaactaagataaccttaaatgacctagaagtagcaattaagagaatttaagttcataaatttgagagaattaaattcataaagtttgtcagaccacagtcttttcaaaagatattaaaaagaggcatagttgtaagagataaacagggctgaatgtaatagaaatgaggattagacgaggtcaaagcaggggtttgttgttttttgttttctaaacattaagtggaagtgcagcaagtgagcaaaacttatttttaaaaaatataagggatgttatctaattttctaatgagttagaatgggtttcttggtagttttcagttgtttaagaaggaagatcataaatgctaccttccattaattatatgtgactcagttagggctccatactaacagtctaaccaaatttctcattctggccaggtgaaactgtagagtaaaatgttggccaaggaggtaacagctatcagaaacagtgtctcaggatgagaaggcttgtgtccagtagagcatccctgcatcaacatgaacagaacaagagataagaacccataatattaactgcactaactaggtgcctccatttggtttaattatgtttgctaatgaatttgtgggcttttcataatatgataagcaactacttaaaacttgtatttatattgggaaagtcagtaatcaccatttctcaagcagaaatgaacagctttggtactatttttatctgtgtatgtctgaaaaaaattgtcactggaacaaaaaatacaaagtaaagatgtaaaaagaaaccagtgcacatatattctatttccatggctttatacctcactaaacctctattaccatataaatacaatatgaacagaagataatctcacaagttgcaaaatgcatagttttgttttgttttgtttatttttgaaatctcatttctaaattccaattgggatggaattttcaaaagcattgatattaatatagatgagcatctttaaaatgttgtagctgtattagagtaatttaagaaagataaatagaaggtttaatgaaggagctaaatttaaaatatgagtatgctaccatgagagatgtttgccttgaagaaaatgctgtaaacacagggagaccacacgtcatttattatcagttgtctgatctcaaggcagtcactttcagcttccatataccatctatcaaatagaaataatacttaacagaattactgtgaagattatgttggataatgcataagaacccatatctaaagtaatgccagcatgtgatatttgtaactgatatttattacgatatcatttgtgacgccaaccttatgctttatgaatttgtgagaattgtgataaattacgcatgcaggaaagtaaccaaggaaagatgtcttcagttttagaggggaaaatgtggggttttgcccttcgaatccttaaggtgtgatacacagacactgaaattgttctgtggtgctgagttaagacttatcagctacctggaaaacagtatttagaagctgttcataggaagactagatcagtatggagatatattctaggccactttgcatccaataatgcagtttatttggtaattgaaatattaaacatgaaagtaataagaatacattttttacctcagtaatgatgccaaggaatgttctggcaggtgaacattgacaagatagaccaattaaaacttaaaaaaaaaaaaataagtacataacaaggagagaaggtagaataaaaaagctgtttttattgcatgggtgttttttattattttaatttttcaagacagggcttttctatgtagccccagctgttctggaacttgctctgtagaccaggctagccccgaattcctcagtgctgggattaaaggcatgcactaccactgtcagcttgtattttgtttttgtttattttgaattgttttagtgggtgcagattctttaggctttctactcttcttgtgcagagcataaagtgataggttgcaattggaaaaaaaagaagtaaaaataaactctttgatcctcaaattaatttgcattaaaatagatattaaagtagctttgactgagtgccttctagttagtggatttttcagtctgcatgagccttcatacagcagcgtcatgtattcatggtcattttgaagaactagtcgagattaaccagacctctataactgatatttttgacatcactttgagtggcacatgcccaggaaaaaactcagaatgaacaaattaataaataaagcaacttctaaaaagtaagttttttttttttttttttaaccttctgactaagaaatggataaattttggtgtgctgctagtgctatagtaaccttacagagagttagatggcatatgtaagattgtatgtaaacagtttgacaatcaaaaagatgttagtttacaaccaaaattattgcgtgctggttacatttgtataaaaattcagatccctacactggaaggaatcagaaggcatgtaatcgcaggttaatacttaatatatttctgtaaaatattgatgtgtacaataaaaataaaagattaactggtgaaatgtttgcttgattgatgacaaaatactgatttcttgaaatcatataaattctttaaattaaaaagaaaatacatttctaactgttaaactaaaagctaatatccaagaatgtgtggctaaaagtttttgcaggactttgtaagaagataatttgatgaagatgaacttttatcttccgtgtcttttctcagttgtcctactttaagagctaatcagagaaatagctggtgcattccagctcatcaatgtgaagatcttccagggcccaccatagtggtgtattcctgtaatccctaaagttgggtataagtttgaggccagcctagaccacataccaaatcatccagggctatgtagacatcctgtctcaagagatagagaatgaaaattacatagtattccaaatctaaagtcatccatcactatggagattgaatatgagggccatgaagatgaggtcagttcacaggtgtccaccaagcagtttcggggagccctttgcagaaaggatacatctagggactgtgaatgcaggccagtactttcttcagtcagcttgagtgatctgaagcaatgtaacctgacaaacatcagctaaacacctaatgtgactatgagttggcatcagtcagtttaggggttaaaaatatgaaagcaaacattctctacctgagaagcctgttggactgttaccctaaggtaaggtgtccttcctgctaaacagcattatgacattttctacccaccacccttaatctgaaaactcaacacaaccctctgaattgtgatacatggcatatttttttttcaattttattttgtaagttgttctttttagagtggcaatttgtaagaacatccaaactcccctccaccactaccaccggggcatttctctaagagggtgccaaagctttgagttgcatatttggaaacaagcttcttagttgtagaaatccgtcctatctaacattctcagctttgtgtcctgtctggggaagaggaatcagaagaaactgagcccaaagcacaggtcctgcgtgttgagggcgaggagagtataaatagccaaaagacagaagcagagtgtggaggtaccacaaacagtgccctgtttaggatcagatcgagttgcctttgtggtagatggagttgaagtctcattccactggccttgtcttaatttgcatttatatatttgtttggggttggggctgctacagtacacttgtggaggtcagagggcaacttgtctgtccctcctactacaaagtttctagggattgaaatgaagtccttgagcttgttggcaggccccttatccgctgagccatctcaactctctttttaacttttattattactgtttttgtttttgagacaggatttcacttatccaggttgtctttgagcttggatttctaatgaagaacttctgatcctcctgcagtaccacacctaatttgtggggtgctggagactgaacccagggtgtcgcatgcaaggcaagcatcctccaactgagatacatactcagctccctgtactgtgctagcctgtattagaatgaggtgttgtttcattttttttgtttgtttgtttcattttttaaccaatgaaagaacacatattttcacagggggaacaatatgtccaggtttctgtgagacgtgctcatgcagatcataggtgactcaacttgattatttcatgggcactggaatagcagtttactacagtgtatgtaggacactgacgtgttgcctggaggtatcactataaggtaaggaagggcaaattttttattcattttacaatgagacctggcatccaagtgatgtttaatatttagatggatcagcatctcttagggtgctgtggttctgcttgccctgaatagagtaggttgttccatatctgtgcgcaaaacacataaatcaccacttgaaatgtgatgattctgaggatgtgctttctaacaaataccctatgaattaaaatttataccttacaatttaagcagactgatgagggttgaaaggaagggggaggaggttaattgtgcacacatacaaaactttgtccttgtgttgctgtcaagagctctacataaattattcttactctcctgtgattttagcatttactgttgctgaacgtatatttaatcctttatatactccttagaactacctcagaggcatacccataagaggaagaatggtaaagcttatgattggcagggcgtcaggaaggtgggtgtttgtagttcagccagaaggacatggcatcttcaagcattttatagttcataggaaataattcttggagacatccgcacagaaggtttcataccagagtattacttggttttggcttttctaggcaggatcgctatagcctaagatggccttgtacttgctgtgtagctaagaatgatcttgaacttgtgaccctccacctttcaagttctgacatgataggtgggcatcaccatgtcccaccactgattttagccgaatgccatataattaaagtctctgagccctctatcttttgagatttacttcttcctttatctcatatatactatgatgccaacctagttaaaatggtctttgtaagttagcatctttttgtttgtaagcttatagttaaaccttttgaataaatctcagacctcatacatcttaaagaagaagtatcatagactaccttgctgaagatgcagggatcttactttcaggcaatcaataattatgaatttttctattttagagtcagcctagaatgaaccaataagaccatttttaaacctacaaattataattttaagatgttccattaatatttttattaattttctaccattagagcagtgattctcaaaccaagacatctgccctctgggaggcattggggaatgttgggagtctttgttgacagaatgggaagggggaagctaaaagtgttgtgagaccaaggtaggggtgctgtcctcatgcaatgctcaaggaggctccttcacaacaggtttacccagcacagacatcactgctgccaaaatgaaggagcccagaacaaatgattatcctaaggaacctcatttctctgtgccgggacatctgcctgttgtcttcaggatttctaactaggtcacttgttattttgtatcatgtcattatccgcaggaatcctagcacttccactgggctgcttcgtttatatcccctgcacccacccatctcccttctattatgagccaacagtgacttccttctggagatttcagatcatgcaaatgattcagagaatcaattaatactccctacccatcctgagtcttcagatatgaattataacttccatggatttaaaaaaagtattatttccaagaactagaataattccaagatattaaagatgaggatttttttttcatatgctaccgaaaaactgtagcatatgaaaacagcctatttcagaatgctctttgaaagggtattgtgggaaagttctcattacatacatccagcaggctcctgtgagttttagaggagccatcagaaaactgaataagctgctgaaacaatggaactgcagtttcgttaacaggggcttaccaggtgttgagacggtgttgcagattggtagttaatagaaggcattaactgtaagtgcctaattgtgctgggataagtgttctttacacagagaaaaccctcgaaaccgtaccacagctagatgcagaggtttcaagacagccagcactcactgactggttatcccggtgtctgggctaaactttaggagtatggatgccaacaaacactgggtacttatgtaacccaattgctcctgtaattctggttatctttggtttcatcctcactaaccacccagggtaggtgcttagattggcctcattttgcagaaaggaaaacagacactctgaaggcaaggaattcgatgaatgtcatacggttggtaagtggtaggggggcatgattgtgcttcaaactctacccttctgataccataacccacgtgctgtgactgagagatgccttatctccagagaggggtcagatccagttcagggtcaccaggaactgcatacattccaggaacagtccttgtctcctccatatactaattattttttaagcagccctgtgatagtaaacactgatgttcccacgtggggatcagatagaccgttcattaactcccagtaggtgcagcttggctgtatgcatgattggaaaaatagacagagaccaatgaatgcccaggaaagttacttgtagggagatctgggcacgtttcacaaatgagaagacatttggcctagatatgaaggatgaaaaggatttccatgagatgatacaagggaaagcattccatgacagaagcatggtagaaacaaatgtttgacttgacatgaaatcctaccctttcattagtttcgggctgttaagattcctaagtatgttttcccttcataggctggttgaaagctcaaggatttgaggcaagggcagccagtgcctttataactgtcccagagtaggttctcactgaactcagcctgtgactatagggctcccatctattttctattgggcgcctatctatgcatggagtctgcgccactttgggcttccagttacaaatcacaatccatttacatttttcttaccagagagaggaacatggcacacacatagtacaggagagaaattggaagccaacgggaatatcaataagggcttagtccagtgttgacttacagaggttcagtaagcaaatgctttagcgttagatgtgtccacttatgagactaccctgacagactttgcctgaaggagaggtgtgaaatcactgggaggttttttaaaaatcaccagacatctctctggcattgaggatcagtaggcttcctgagatcattgagtggctgaagacagggtgtgtgctgtaccatgtaaaaagaagggttaccatacaaagaaggattagcatgaatatctgatatgttgctgggaattttatttctggtggctgttttgacaaagtgtattgaagcattcacatttgtatacttgctcatatagcattactatcaatttgtcttaaagcattgttgatatatgtaaaaatatagctagatggattgtaacatccctccccaacacattgccttatatactattggccagatgatagtataagtcctttgtgaatactaatgaattcaattcttattccacttccgtggggcctctagatagcattattgcctccactttattaatagttaatgaaataaaagttccagacagttaacccattccagatcacacaaaaagtggaggatacagaactcaatcagtggtgaattgtctctccttgcaccactgtcagatgaaggggcagctgcaagagatcccaaagtccacagtgtgaaatcagaaagagataacaatatagaaatgcaccacgggcaaaccattcaggatccacaccctgtaagccctctactccaaaagctcatctctccatagctcacatctctgccaaggttgccacaatgggggatggatagcctccacagctcctctctgtacagcctatgtatttctggatcttgtttaatactgacctcctactcactgtgccctctgcagccttcccctcatgaacagtatccaacacccttgggtgttgtccttaaccccctcccccatgctttaactgataactccccaggaccctgtcctagtattccgtctacccaaagactaaacatgagaggccatgacactgaacaccactgctgctttccaaggcatccctcatgccataactctctgttgcactcctcctcatgaggctgcaaaacaactcactcccgcacagatgcacaagaaatacagaactcctttggccattgtgttccttgttcatagacttttgcctcccttctggatcatccccagcagctggcagtcaccactgtcctttgaattatacccacttgagcccatcttccagatagaaagacagatggaaggtatatgtgtgtatatgtacacatacatgtgtatgtgttctctactgaaaatacacttttattttcaaagatgcactatgattcttaggatgaaaaagacccctccccatcaaaatccagaggtaagcaaactaatacgactcagtgggaaaagaaaacaactgatgacctgccatgtgtgcaaaggcctctcaaacaaccatcccatagaatgctaagctcccgaagtatgtctccagggagggcactgcccaaacaagaggacagtggtaccattgtgctgctgcagaggtgaaactgtgaggaaacagttcaggaactggaacggaagaattgagtatagagatggttgggggaagatggcacagtcataggttgtctgcagtcattctgcaggggtgatacagaaagatgctatgccctcgtcagtcttcctgatgagtgctcctgtggtagacatcttggaaaatgagcaaaaatcccatgagattgcactaagggagatttggcatttatccaaaccaacctggatcagttggtccaaaagtcaaaatcatcaaggaaccttttacactactttcatgttttcatgggctaagtgttggagtcagcatttgagaacacctcctgggagatccccacgagctgtgtgaaggaccggaagatggaaatgcgataccagcaaaggaaaggctgctgctctgaggaaaaggaaagataaatcgtcccttggcggtaagcaagagaagcttgaaagagtgagtggttctggaatcagccgtgccctgataccttctagccttgctttgtgcccttggacaaaacagctataaagctccttccttagccgcccgtttttctgtttgtcctcctccctttgccactggagactcggtatgactaggactttggaggaaatgattttcttgcctatcccaaatccccaccctagtcaacaagatggatttcacattaaacttcccacacagccacctggcaaattaacgctttttgcccctgtgttttcctccccagcctacatatcaatgccttcccacaggttccatatcttctctccctgttctccttttatgatcctggtttatatttatattttctagtcgattaattactgacatgcacacacatctttagctcttcattcttagaaaagtgccctggtcccccaggctagttgggtattcttaagttgagtcatcatagcatgataatagaaagtcactttagtgttgctaccatctgctgtacaacctggctctcttgagagttttgtaaattataaagtgactgaatggaaatataattaggtacttctcagattcccttatgctttctatttctttttgtggtgctaggcacaggctagccaggagccctgccactgagctgcaccttaaggtttccctaatattttaagttttctcatttggtctatctcagattttgttcccctggcaccaaactgataatctagcatgctggaatatacttggaaactagatgcattgcacttgcataccaccctatccacactgcattcataagtagattatcttcatggatttcaagagaccttcagcttacctcttggtcacagcaacttgcttcaggcaaatctttctaggaaaacattccagaaaaggacctggatcaacagctacatgatctgggttttcaatcacccaagatcctgtgacctctcactcgaggcatgctcagcctattctccaccctgattgggtgtcctctgggaagcaggaactaagctctgagcaggttccaatggggatgtacccctcagctgcagtggccccagaaagaaggaggaaggagctaaaagatactaaaagtcggtcaactcaggtcgaggtaaatagtctaaatctcaggcatctctccaagtggggctatgaaagacagagctaagctggcagtcatgggggtcagagaccaatgagagctgctataagaagacctaaatagcacgaagaggtcatggaaagaaacatggtggtgtttcttaggtgttttcttcccaactaccatagggagcctagggtatccacacccagcattttaccagctgcatcaacagttacttatccctccttcctttaaaaaattactatatttaatggacaaaactgcaggcaatactggtgaggggctgtgtgaacaagagctgcaatagcagcagatgtttgggctgagagaagggagccgtagaccaaagcttaagcactgcctgactgagtgactcttctggggagatggcttccacaggcagcacccagattttaagtcaccagaggcacagagtggctctgtttctacccggcagtgaaaatagatctgtttgaggtgcttatctgaaatagtttttctttcaatgaaaattttgattttatttctatgaatttttacttgcatatatacatgcacacatgtgtatgcctggtgccctctgaggtcagacgacaatgcctgatcccccagtggatgctctgaactgaacctgggtcttctacaataatgactcttagccactgagccatctcttcagcccctgaaatgtatgtttttagcataatattttaaggattttaaggagttcttttatgctgtgctttttaattttttgttttattttatttggaactgggtcttgtgtgctgtccagaaagatttgtgttttggaagaaatagttgaaaatgaaatttgagaaagggcaggaaagaaatagacatgaaaaaggagattattcactagagcaattttttttaacctaaaagagagaaccagaaacaaacaaaaactatctgtcattctgcctttattgcttaagtggaaactgatcattccaacattggaaaatgctgagtttccaaagtgacctcttctgatactgaagataaacacagtgatggaacataggtagtcagcagcgagtagataaatctcctttctgaacagcctacttgcagaaaaatgttgacaattcccaagcttggctttggaagcattcagttttcttatctgtaaacagcaatggcagtagtgccttgtacatgtgtcatggtgttgagggcattgaatgaaaccgtacaagaggctgcccagaaccatccctgacaccctttaagtagtccccctctctgttagggggttgaatgggttgaattaacaccttcagtgaagggggtaggaagcttctgtaacagacactgtaaataatatatcgagtgagtgtttttaaatgtattaaaggcacctctattccttaaagttcaaatatgagtagaggctactgactgtaagaaatgggactggggggtctcactaaaatgatcatatggtccacagtgtttctggaaggcaagcagttttacttcttcagagggtgcttgatcaagcaggcaaacacacccagtggaggacccactggattttcaatcctaacataaagaggtgctgtgtcattctgaatggtcagatctgcagctcacactggctactttaaagcggcacagttgctaagcagaatgcagttttaaacactgagtgcgacctcaatgtcaagagaagtgctgaccgtggcggaatttttaaatttctgccttggcgtcttaaaaaaaaaaaatgtaatggggttttgttttacttaaccctttgatataaaaggcagagcgtttgtttgtttcccgtagaaggaactacgtatcctctttactaaacaaacttgctttcaaatggctttgcttccatggctgtatgcagataagcagagagcagcctcacctcttcctgaataggaaggatcaggaggtacccccaccccaccccgggcttaaaacaccaatttctcatagatggtctcttacccttcctagttcaccaaggagtttctcctacttttccctgaagtggcttcaagtgatgggcgctggctgccaggccaactcttctaacacacaaacttctggccctggtaccaggctgacagcaactctccagacctgtgttctgttgggtacaaaattgcttatccagtctagacaactgatctagaaatccgttactcgatgtggccatctagtggccaaagtaggaaataacttggttcttctgaatttgactagaaataaggaagctcaagagcactctccatttatatgctttctgctcactttgcacccacccggagcaattttactctgaagtgtacaaaaatactttatgcattactattttaccaagttcattcacattctaaattcacacacacacacacacacacacacacacacagagagagagagaccatttttttttttttaccagattggtgaatttttgtgggatcaaataggtaattaggaaaataagctggactttattataggactgtggcctcaaacatattcccttattattgaatttagcaaatattttgtaactatttctgtttataatttttattgcctagcgtgtgtgtataagtttgttggtaaacgctgtaaatgaatttgtaaacaagctgtctttggttcatgctgatgtggaggagtaacatttgaatacctcttgcatcttgggtttgaatggttttacatttttgtgtgtacggggtgtgtatgtgttggggtgtgtgtgtgtgtgtgtgtgtgtgtgtgtgtgtgtgtgtgtgtgtgtgttcttatgtgtgagtgtggatgcacacacatcagaggacaacctcaggtgtaggtccttgccttccacctttgtgacaggtctctggttccccatgtcctccaccaagctaactggcctaaaagcttccagcggttctgttgtcttcacctcccatcccactgtagaagagctgggattacagatcgtgttgctgcgcccacttttatgtgggctgtagggatcaaaacccagatcctaacacctgcacagcaagaacttttgcctgcaggtctgtctccccagcccttagctctgctttctatccacactggcattggctcaaactctatatatgcatctcttcaaaatccacttctcttccagcagatcccagtattccccaggcagaggaagccccgaatcctttgccgtatcagctcccagactcaactgtttaacactaacctcactcttgcagtggtttgcgatgctgtctcctccatacgaagggactgtcatcagcatttatcaaagctgtcagcttgcagcagctgcgtggtgtgaggagcactaccgggagttgacttggtagagcgctgtcttccagtctaagggtacatagatcttccagcagctgcactacacctgtttccaagtgcctagttctcagttctctgttccctatgcattctcccctggtgaccttccagtcccccagacactactttcctctgtcaccctgctccttccccttctcaattaaaagtcagtctgactgtgggtgtggctagtgaggaaggagggaacctccaggattaaaacacaggatgatttaaaatgtagatgaaaatacaaaagaaatgagtatcatcccaagttactattgaaggccagtcagacaactcagaaggtaaaaacacttgctagcaagcccactttaccagaattcaacacgccaattcatacgtaggcatcaggtggtaaatggggatttctccctaaaagttcactgagggacatacctaaaaccagtccatgaacagagagacagcaatttgagcaggccagtgtcaagtaatggggaactcagctgggctctctgcctgtctgtcccttggtggatagttcaatgacaggtcagtgtggccctcagagtgaactctttacatggtcttggtgagaggtgctgcactcttcgtaggcctggtatattttacaaatcttcagaggttttctgatgttgtaataaattcaggtgttcatgttcccagcctttggtaagtttataaatggcactgatgtactgtctgggatatcactgttgctctgtctgggatgtcactatcagtctgtttcttgtgggtggtgatggacaggaggtggtgaatggcacgtagtactttgatgtacaataggtgctgtcatcctgtttccatttgcactcaagatagagccaaatgctgtttagctgttttgtaaaatgagtagcagggagctttcgtatataattttgttggtaagatacaggtttccttaaagggatcaatcatctcagtttacatacatgcatgcatacatacatacatacatacatacatacatgtatacatacatatatgattgttctttggtcatattccccccttaccctgtcttggccttccccactcatactggactccatctacccctcaaaacagtcccctttcatgatagtatatgtgagagaaaacacacaatattaaggaggaaataatagctttgaggtcagaattgggttctcgaaatagcctttgatacgtatagtactcactcactcttctgagccacagatttcttttcaaaagaatgacacactgtatgtggtgtgactgccataagcctgatgcatacttgctagtggcctcttcctttgccttccatgttgttcttaaagcatgtaacacatgaaataatgacactcaacaccagatgatctctgctgggaagcagagacaagacaacccatccacccatcctcatcctcctgagggaagctctaggaattatatagaacacaacatgtaatttgtgtgagggagaatgtggatacacatatgtgtaggtcagaggtcaacattcactgtcaactctgctatctaccgtgttttgtgggatagggtctctaactgacctgaagttcattgagtaggctacacagggtagcttacaagcttcaggaatctatgccaatctccatgtgccaccgtgcctagctttttatgtaggtcctgggaatcaagcccaggtcctcatgtttgcatgtgtaacaccctgctaactgatccatcttcacagtctacagtaaatactttttactcagagcccacaagaatcgctgagggactgataatatgtccccagggcactgtggtttagatcatttcaagtgggtcacactgaaagaccagtcaaactacagctactgttcatttatccacctgtttcttctgagcaaaacagggcttgctatagtccctcccaccatgagtcagcattaacctggaatgactgaaatcaaacacttgaaacttgtgcttgctaagacacagcatgctaaaacaaacaacaaaactgtattgacattagaaaaccctttacttaaataggctaagaaggaaacccaccaactcccaataccctggcttatcaccaaggtgacaatttcacaccatagttctaacaccctggcagtactgctgtgtcccaccccctctgtactctccctctcctggtcttgagttatttcctaccttttcactcattgaactttgctaatttacttgctgaaccttttctcagacttactattgaacttgaaattctgcaaggcactgtgaatctatgggactttctgcctattgtagcaccatgatcgacgtatagataggcaatgtgttgcctttccctaaaactagtttattcatctctaaggtatgttgagacttacaatttacaatggtgaaattctttgcactaaattttcttgctgtggagaatgaaataatatactctaaattatagtaaattaatgacaaattaaaggtcaaattttagcatttgacattaattataaaattaaatgccattacatttaataataatatttgtaaactctatggagtcaactgtatctaaatatcaacttattatgcattaactagatttctagatgtcttttatggaaaataattaaaggatatatcatttgtgatgtaaaattttaatggactaaaattagcgttctgctgaagcacgttgaatttgtgctcagaattccttactgtaatctgaactgaggtgtaccatttgtttttggtcactgctctccaaggttattccctcatgctgtattctagaacacaggcttcttttagtcagtaaatagatgcccagttatttattaattattgctaatattgcacgtatcatacaccgagaacaatgctgcccctatacccttacacacacaaagcacatggttcaaatgaattgactgtgttgcctgttgcccaattctttttgcctcccctcccccccccctctcttcaagacagagtttctttgtgtagctttgaaacctgatctggcactcgctctgtagaccaggctggcctcgatctcacagagatccatctgtctctgtcttccagcacttgccaccaccacacttttctaacagaatcacaaaattttataatgcaaacaatgtttctttatgaaaacaaaatccagggccttagagagattgtcttaatctctcgaagctatgaagcagggtagtgagagggctggggcagggccccatataccttctcgctgcttcttggaagaccagtcttgttttccttccctctgagagctgcctctgcaacctggggctagcgtgtaactttgcacagcgtgttaccgagaactcttctccaggggtctgcctatagggtgcatcgtttacttccatgttactgtgacaaaatattttaaaaggaagaagggcctattttggctcatggttttagagcattttccagcatcatggtgtggaaggtgaggtgaaaaagagcagctcctgtcctggcaagtcctcgtgtcatgtgtcacgcaggcccggaagcagagcagaatttgggcagaagctgcttcatttggtgccaggctgactttagggctttggtctttgttccacaacccacacaccgttttttttattctacactttcttttataggtaaatacatttccagttggttttcctggggagcttggttcattgccacccaggatctcttgttgtttctcaagcatcctattgatgccagattctctgggtagcgtttcttgtgggacatgtggtttgcatgtgatttctcactgctccatgctttacttttctttctcttcttgcagggtttgtttccattaccaccctcactgtgctggcctatgagcgttatatccgtgtggtgcattccagagtgatcaatttttcctgggcctggagggccattacctatatctggctctactccttggcatgggcaggagcacctctgctgggctggaacagatacatcctagacatacatggactgggctgtacggtggactggaaatccaaggatgccaacgactcctcctttgtgctcttcttgtttcttggctgcctggtggtgcccctgggcatcataacccattgctacggtcatattctgtattctgttcgaatggtgagttgaaggcggcagatgtccctctctgaaccatgcccacatccatcactgggtgtgtaaagaatcaaactctcctatgtaatcagttactttccccgagttcaaagactcttcaggacttaacatttggtagaactttgcatgtgaatcattccccaagcacatcactgagggatgacatttgctttctgcctaccaccctctaaaaccaaaagaaacaagcaaaaggcagctagacaataccaaccccagaccttacattatgcagcactcttgaaagttaggaattctcagggggaaagttgcaatttccataattatattcatttcaagatcacatgaacccacttgccagagattggtagagccgtaagggactggacacacacacacacacacacacacacacacacacacacacacacacacacacacacacaaagcaggtttcatatgggaaccaggcaggaagaaggtccagttacagacacaggaggtacagctacatggcactgttagcttcagcagtgtgccatttcctagtctgtgtgtgttaggtgagggttttgtatttatgactgatcagtgactatttggggaatgagttacaagcagagtagatacaagggaaggattgaagacaggaagtgactgagaataagatttgacttgactgtagtctgttattaccttaggagagcactccttgcaggcttctctctgtagtatgtccagcatgacataagtctgttatctggatagagaatttgtgaatcagtgctctggataaaatggtttcctcagtcctgaagaccacaagcctttcagcctgtgttttagggacttgaagatctagacaaaataatgtattttgtccttagaaaagcatttaaaagccattaaagggagctttaagttggtaaggcaattgctggtcacgtgtgaggacctgattttgaacccccagaatctatggacagcagtgatctgtgtctgtaacacctgcaatcctatagcacgatgagaggcagaggtaggagaatctctagaaacttgcagaccagagagaccttatctcatctcagacaaagaggaaggtggtgacctaggctgaggctgtcgtctgagctccacacaggtgctaagggatgtgtgtgcccatttgatcctctcctcctccatctctccctcactcctcgcccaacatgctgtaggatgtccttagctcaatcacagtaggttttagatgagggaactgaagcccagagagataaaggctaggcccagcttcaggtcagaagtcagtcagtctcctggggccctgggcatgtctctttccatgaaggcagggcaaataatggtggctgctgatctctttaaaaagaaaagggatcattttcagtcccatcctttcttcacttcctgcagctacgctgtgttgaagatctccagacaattcaagtgatcaagattttaagatgtgaaaagaaagtggccaaaatgagctttgcaatggtctttgtctttctcacctgctggatgccttacattgtgacccgcttcctggtggttaacggctatggacatctagtcacgccaacagtgtctattgtttcttctctctttgctaaatcgagcactgtgtacaatccaattatctatatcttcatgatcagaaaggtaagctctggaattgacttgttttcaccccagggaacaaatagaaatagattttatgtggtgtgacaacacagaacattgtgaaggataaaacaaaacaaacctaaaggagcaaaaaacccaagttaagaattctgtctaagtctaccggggagatggctgctcttctatcagactagaatttgagttctagcacctgtgtcacatgattcacaactacctgtaattttgtctccaggggatccaatgccctcttctggactctgcaggtatcaacacacacacacacacacacacacacgcacgcacgcacgcacgcacgcacgcacgcacgcacgcacgcacgcacgcacgcacgcacacacacacacccatgttcacacacacacacacacacacacacacagttcacacacatacacacacacacaccacacacacacgttcattcacacacacacacacacattcattcacacacacacacacacacacacccatgttcacacacacacacacacacacacacacacacacacacacagacagagagagagagattaaaatctcaactaattgtcttgaattttgctacagattaaggaccaagttttcacttaataattgactttattgctccatttttctcggcagtttcgtaggtcccttctccagctcttatgcttccgactgctcagatgccaacggcctgctaaaaacctaccagcagctgagagtgaaatgcagatcaggcccattgtaatgtcacagaaagatagggacaggccaaagaagaaagtgacctttaactcctcttccatcatttttatcatcaccagtgatgagtccctgtctgtcgatgacagtgacagaaccaatgcatccaaggccaatgtaatccaagttcgtcctttataagaacggaagatggagtcttgtatcgctgctacacaatgtctactataaggactgacttggagtccccatttggtatagtaacaacagaacctcatggcctagcaggagatctgaattggccatatgttgtctgttttcaagaagagactgaggaagataaattattttcactcaatgggtgctttataacatgagaaactcctggtggcacaagatgagcatctggcaccatcatctactatgccaggatttaacatttgaatgaccatatttgccaaagcacataatacattttgtttctcaaatatagttcactgtataaataaccgtctcatacacatgtgtgcaatggctgggacatctggactatgtcatggtgttgggtcctattctgtgccatgctgtgtgtttgaccaattcagtttattaaggagctaataaatcaatctatacttttatctggaaaccaaaggctgttgtcatgtatgtagtgtgactgccagggcagtcagcttaaatcccagaaggtactctgtgaagcattgtagaaaagcaaagaggcttcacgctggccatgcggatgattgataataccacagtggagaatgtacatgggaaagggggtgttgaagacagattgatatctctatttattccagaaattagtttgacaaactcgcctttccttttaatagtttcccactattttatcaaaagtcctgcatctgcagaggagtcccccgtaaacaaagttatttattcatggtatgtgtgtgtgcacgcatgtgcgtgttcactcatgtcatattatgaatgtggaaatcagaggacatgtgggaaacagttctctccttccaccacttgagtccttggtattgaactcagttcccaggcttggtagcaggtggcttttctgactgagccacctcaccagatctatacaatgtgttttaaaattttcattgcttatcagtaggatcctggatagtggatggaccatgttactgaaaaggacatcttttagtatgtcattgttcatacctagaggagaacaaaacatactgccctcccccatatggtccattttgcagggtcaccttgagtggaaattcactaagaagaaacaatagaagaaaagcttcctccaatataccaaggtgatctaaggattgctgctgcatggattccagtccctttcctttgtctcagcctgtctctataactttgcttcttgttgaagatgatgtaaaactgggctttgtatgaaaacttattttctttttaaatgttcctaaaattgtactcgatttttatttaaactgtttcctcacaacattgtataccacatagatcccctcttttaaataccttttaaacttaaaataaaattacataattctctcctttccctttcttcactccaatccctccgtacatcccttgctgcttctagaaatcatggcttctaaagaattttaattatgctggggggggggagcctatatgtggctacgtacacaggggtgcaggagcccaaggaagccagaggcagtggatctcctggggctccatttatgggcagctgcctgacatgggtgctgggaacagaactaggagcctctgcaagagcagttcatgtacttgacagctgggccatctctccagctcctaagccagctcattgtcagagtgtctcccatgtacatatgaaatatgtatgcttctaaacttccgtttgtttccttttgtcaatctgcctattacagtaaccacagccagcgaacttaagataaataaaaggaataattatactgtttgtttatttttgcagtgctagggaatctaacgcaggactctgggcacactaggtatgtgctctaccactgagctacatcctctttccaggaaaaaaaaaaaacaatgttttttctttcgctacacaccaaacctagattattaggactcaaggttgtctttgacaatatggaaagtgacaaattgtttcatcttcattatctcagtcttaatttcctatgtaactactatcatggctttcaaaattaacaattttcgaaaagaatttctaagtgtaccagtcagcctactaaaggaccaaagaaagagtctccacactgccttttgaagatgaagttaattgtcacagtgtgatgttcaaggcatcacttctgtgtgtctgaaatggaacgcactatgtctccatgcttctgcaaaacagccttcccatttcctttttcactcatatatatttcatttactaataacaaccctttcttcttcacttaggatgacattaatagcccttttcttatcttcagaaggtaatgatttggtatctggggaaataaaacagattcatcctggaactccttggaacaccctacaatctcattcacaccctgggttttaacaaatgctctgaacttgcggttagataagctccacttcctgctataaagaggaagtagcatgctgggcaagctgtggttttctgtcttgaatgttgttgctcctataatgtcctatatagaaacaaaacaaaagaaaaaaaccaaaccaaccaatctgtttttgagaagtgagagaccttgattattgcattttttaaatttaaatcgacccaatccaagcatgcaaagtgatggaaacactactaaacagtaacaatatctcccctcgtttggctgacaaatacacagaaattctacgtggaacttaattacatgctaacaattgttttccagtagtgaattaaatgtgacaatggaacatgctttgtgtccttgattttggagagaagtcaaacatttgcttctggaacccgagctctctggttagtgaaatgagtttttctagtgactccatggaacttgccagaagacacctgtgcacctattccagtagccagtggttccagtccatgcctgccttctcaagaatcccagaggtctcggggacaggtggtgcaaaagcaggtaggcacttccaatagctgtcagggatcccaggacaaagagccctttgtttatcacctgcaagggcagcaaaaatccaaaaccattcacccagaggtcgaattctaagataaactttattcctacagcacagacaagtatgtgattctcttcctaatcaaatgtacaggtgtctgcctgcatcacaaacaagtgtgcagttctcttcctaatcatagacaagtgcacacatgtcttcctacatcacagacaagtgtgaaattctctgcctatatcacagacaagtgcacaggtgtctgccttcatcatacacaagtgtgtgattctcttcctatatcacagacaagtgtgcaagtctcttcctacattacagacaactgtgcagttctttgttgcttttaacttgaggcagaacttaattgcttggcctctgttctgtccttgtccttatttcaacgcactctatctgcttggctcttctttgcatttttatatgtttgaggtcagggacactattttatttggtgtgtatgtatgtgtattgtgtgtacacatgcatggggtgcacgtgtcagtgcctacacatgtggaggctagagatcaatgtcaggtggttttccccttctctctccaacttactgttttgagatagtctctcactgaacttgaaactcactgttttggctagcaagcccctggaatctacccccccccccactagaacatggttacagatgtgtctgtgcccagcttttatgtgtgtgctaggggtctcattataggctctcatgactgtgcaggagtaatcttccaagcccctgttttactcatctttatagaggtagagcttataggtagatcttgattctttccaacctgttctctacacagcaaagtgattgatctaaaatcctggcctggatattgaagtcttcttaggtctccccgctttcctgtttcagcaagattctaaagactctggttacctctccagcttccatctggccattcttacaccctggacctctaggctagtgtatctttagccttcatttcctagcctacacccatattctccttgcagtcatccaggaagcattctccgttatatatttgtccacctttcctattagttcccaaaccacatgtatggtaggcactacatcttgtccactgaagtatctagctcagtatatattcatccaatagaagtattgacaaatgaagttataaaacccccaaagcattcagaaatctgaactgcaattcatcacacctgtgggtcagtttctctaaatgaaagcatcactatactctaccagatggtgttttttaagtgacacagctctgtctaattttacaagttaaacgtacaaacataccacataatgcaaaagtcaagaatggatcacaatgctaacacaagataaaaagctgagcaatatcagccttgttttcctcttcaaatttctctttgctttttgttttttttttttatcatgcagagtatgtaaccctctactctgtaaactcagaacaggttttatttggaagagaagcataatatctctgttctgtcatgtctgtgtttccctgaaattaagatgaccatgaaacatatgacaattcaagacatcacccttttcaatagtcaaatccttccaacctttttttgccaatgccagcgcagcactgcctcgtggtatctaattctggtgaaggcaacctgcagggggatttaaaaagcatctggtgtattctttagtagctaaatagggagaaagtgaaagtctttaatacagtccttaccatggtatagagagggataaaggtagatggcataatagcatgaagaagtttatctaggagcctttgaaacaggaaccacctagagttgacatgtgctcgcatctgcaatgacaggagtcttaaaaagaataccttagatgaagcacctctatttccttacaacagtttctttcattcacagttgtcacaataatggaagctaataaagaatcaaataaaattccatttccacaatagtcactcccaagtgcccttaagaaacctcaggagtacaaaacattgccttgaaaatatacaaaatctagtctgtttttttttctcagaagacaatttcaatataaaatattctgtttcaggaaaagacttattgaacgagaattttgaatgtcctgtaagctcaaagatttgatggatttctgttgccccttatttagttggcaatattgtttatggcaacaaggattacttacagatgcttctgtcctggtttatattccttcttaggacaaatgttgtgctatagtcaaactggctttaagtgtgtgtgtgtgtgtgtgtgtgtgtgtgtgtgtgtgtgtgtgtgtgtgtgtgtgtatgtgtgcccacacatgtgtagaatgtgtgtggtatatgtacacaggtatgcatatgcatgaagactatgaagactgctcaatcactgtcctccttatcccatccaggcagagtttctcattgaacttggagctattctgacagcaaggaaggccctcaccactctggagccctaagtgcatggccatgcatcctggggattagaactcaggtctttatgcttgagcagcaagtgtcctcagccagagtcagctcccagcccatcacctgcttttagagtcagacaatatatatcaacaaagtcttccaatatcttctagaactccattatagatgttacaattatgatcaaattgaagccaacattatctctttctgtcttcaagagaaattggaatggtcactattttccttgtattgtgtaaattttttccattctgctattttaaagcaataataacaatcatttgtcatgagattttcatgtgaccagcttaaaatggaatgaacgtgtaaatcttaatatattcatctttctgatcaagaatttgtttctttggcattatatattgtttgtattccatggtattctaaatagtgaggatattctgttaagacaaagttattcaggcccggtgtgatgactcgtgcctttaatcccaaaggagacagaggcagacagatctttgagtgcaaggataatttagtctacagaacgagtttcaggacagccaggctgtttcacagagaaaccttgtctcaattaaaaggagagaaagagagagagaaagaaaaaaaggaaaagaaagtcattcaatatttccaagatttcacaattattttaatgtatctcaaattcatagttcaagagaatagaatatggctacctcctaaatatctgaaattttacctgtgaaagtttaaatattttgtcactctgctatcatcaaaatgctcctgtaatcagaaataatgagtaggagtctttgtcattggctacatagcagcaatctacccctgtttaaggaatagtgtgtgtgtgtgtgtgtgtgtgtgtgtgtgtgtgtgtgtgtgtgtgtgtgtgaataggtgcatacttgtatttgtctactgcatgtgtacatgggtgtttttgtccacacatatgcagcatgtatgagacagggctggagcaaagaaaaataaaaagacttctagtctattggcgaaaggcatcacggaatggggccaaacttttctcacctctatgtaattgtacatagacaggtctgaaattgcatggtcatctggaatcctaaatcttgagaattcaggaaggcacacacctaaaaaccaaaattaaataaaacactgttattgcttaaaataatatacagaaaatatattacataatatacagaaaatatgctggtgtgatggctaagttgttaagagcattggctgctcttccagaggccctgaactcagttcctagcacccaccttgggtggctcccaactgtaggctacagaaagacactggactacgaaaaaactgctgaactcaatcagccggtatacttcaaagatgtaccaacctctgtatggaaaccaggacatgtgttacgttggggtaagggttttgcattggtttccacaggagaaaaaaaaattggataccatcaaagttgatcaagattcgagtaaaaaaggaaaaacctctcaatgaggacaaatggcaggtattctactaaggtatatcttatacactaaatagaaaccccccaaaggaaagggaagtgttttgcttttttctggaaaactcatctccaaaaggcaaaggacactgcataggtagatacttaagaagaaaaggtagctataaccatcaaacaaaaggaacgtgccatatggtaaactttacagctgtctctcagagaactctatttctctttatttcctagtccctattcaattaaaccaatgctggatttagaggtggatttgactttcctcctctaaaatccaagcacgttatttagctaaactttagtgtttctgtattgtatcaagaagccgattgatgtaatacagaataaaagaaaaatttgggggctgtctttgtcttttcttagatctttctctcaaggtgtacaccctctcataattgttatgctctcatggttgcattccccagcacccaaccacctgtaactctggctcagaagatccattgtcatcttttgacctctgaggtacctgtgcacacttgccatacactcacacacagagacacaggcacataaataaatccctttaaaaaagcaagataaaatcttattttttaaatgctggtctccacctaggtcaaactaagtagtgtttcctctagcaacattttaatcttgtaaaactgttgataaacacagaaatctacagttattgagcaatgtccattgattatttcctgttgtgaacaaataaaggttacaataaaaccaatattagaatattggtttttaaaattgtcatttcccttattcaacaaatggaaaataactttgcaatggttaatctatactgagaacttattggacttagaattaccatggaaacatatctctggatgtgtgtctatagggatgatgccagagaggtagaattgaagaggaatgacccatcctaaatgtgggctggtatcctggaatgactaaaaaggagaaagtggaccacgcaccatgagcaatcctagcaggaagacagaataaataggaggagaaatttaggctcaggagaaaagaaggaagaacaagagaaggaggaggagagaatgagagagatgctcaggacaagaagccaggcagacgccagccagtcagatatagagaagcagtgaaagtaagatacacagaaggaagaaaggcagtaagtcctgaggcaaaagggagatgaagagaaacaggttaatttaagttaaaagagctagccaggagcaagcctaagctaggctgaacatggaaaactaatgatacatctctaataagtctgttgtgatttgggaactgattggcagcccaaaagtaaaagcctagtgcatgccacagtaacccttttctaagctgattatcccagatattgttacagtaacagaaagatttctaacactttcctccaacctaggtttccctctctgggtgttcactccctgggaggggaaagactatggcagagatgttattagagtgccaggatcataaacaggcccacaactaatcatctgggccagtctgtgtgcccctgagaaagtatacttactaagatcattattgaatttgtccattagctcatcaaataccaagcagtcttcaaaaccctgaaacaagaaaaaaaagggggggggataagacataaataattcatagtaattataaagataactagttttggtgggtgtatgcacagactggggatcattagtaggtaacagattctcatctgatgcccagtcatgacacaaagaccagcagctggacccccacactgtccttgcctcattgataaccataatgattagaatgatttgaaaattaacaacaaaaaaattaaatacatctgtgattttggtggatcccaatgcttacgactaacaattacacatctctatcatgaattagttgtaaactattcaggtctttaagattcacgtttagaatgacttaatgagctgagcatatagcccagtggtcaagggctctgcctgccatgcatgaggccttagcttcaattcccattactgctaaaaaatattaatgataggatcaaattcatttacctcctataactcaaatttaaaactaattttgaacacaaagaacttgaaaaattagtaagttcatattaaatgcaatgaagaacaagaaccctaagtagtatatttccactatctacaaattcaaactacagttttagaggcaatgtaaaaatatgtaaaataggggctggagagatggctcagaggttaagagtaccaactgttcttccagaggtcccgagttcaattcccagcaaccacatggtggcttacaaccatcgtaatgagatctggtgccctcttctggtgtgcagacatatatagaagcagaatgttgtatatataataaataaataaaatcttaaaaaatatgtaaaatatacttttcatatgaattatagtgattgcatttgaagtagtaaatacactttttgacgaatgtctgtaaattctttatggtataggaactttgacataagagatgacatatatggagaagtcaacagttctaaattcttacttcaaataatttggttttctttgcaatattgggttagacactggtaaaattgtagtgttagacgtgaaaggtgggtatcagggaagttatgcaaaacaaattgtgtagtgaatccctgaggcaagatttgaattacttccagaatgtgggcattttatctacaatgctataactgatgcttacttacgttcttatgaaacaaagagcttgcgagggcgtggtcaggcacaccaacagccagcccccaagcaggtgtggctacagtatcccctacacaactgctttgtgggaaagtctacaagttactttcacttggaatatagttctgtcatcaaagcaatatgtgactagtgaactctaaactatgatcacacacacacacacacacacacacacacacacacacacacgcatgcatgcaagaagttaaagaatcttgattttaacatttaatattggagcactatattttaaaaatttccttctaaccagaataccaaaatttccatgaaggtaatagcaatcaacatctaaccagtatgtagcttgatttagacctgtcaattatattagccaagtttctacattagtctgtagaagacacagttctcaagaaaacaggatgccatatcatacactgtgtgcttttctctggattgggtttttgtagaaaataatctggatcctcgatggagttgaaataatgagtctgactgagcaattggagtgatgagcgaaacggctgtgttcttaggactgtgtggtgatggtttagaaagcaccttctactaggatttactacttgagacagaccttggaatgtccaggaacattcctggactagaggaaaagaactcaccgcattcattccttgcccaaaaaatgggacgatggcatgagctgcatctcccatgagcacacagtgtgacttcaggtggaagggagaacacttcactgatatcatggcctgggcaggcagcaggaagaagtttcttatgagggcttgcctttgagagaaagcaatcagaatatggacaggttacaagcactgctaagttctctcagatttattggcttcatttggatgaaaaaagataatgacaggactgaaacagcaactgagggagaaggagagaaatgaggttcagtggaagattgctcatctaacatatgaaagctcctgggaacgaggggaaggtccccagaaccagggaaaaaaagaaaaaggaattggtttcttccagaaatcaattctgctattttggggctacggagaaggctggtttggtaaaggctggccatgcaagcacgagaacctgagtttagttaaaagtaggaggcagagtgggttgaaatcttgctgtaaagcagggctggcagcacaggactgtgttttcagcaccggaggctgaggaatactgaggattatgggtccaaatcagcctgggttacaacaaggaagccctgtgtgggaaacaaaagctcctgcctctctttggcctgattgttcacgtgccccaagttccatgtgtaaaatctgaatcctcagcacgatggcagctgcagcctggaacctgggagggtttcactagcaagcatggagcccaaatagaattggatttgtgccctttcaaaacagactctaggaagctccatgtcccttcagtcacgggaattctcacaagcagaaggcgccttctgtgagccaggaagcagctctcatcaggcacaaatctgctggtgcctgggtcttgaacatttcagcttccagagctgagagaaatggcttctgtcacttctgagtcacccagtgtgtggcagttttgttgtggcaggcctgtacagctgacactgtttctgtagcactcttctgtctccttggagagagcactggagtgagaagtgagctaggtgtttgttttgtttggtgtgtgtgtgtgtgtgtgtgtgtgtgtgtgtgtgtgtgtgtgtgtgtgtgtttagtatttggaggaactggagaacatacagcaaagtccacatggagggtgatgctgacatgggcctgaactgcagtcacaaaccatctatccagctaattcactcagccttgtggggcagaacttaatttaacatgaaaaataaaagacccagagacagatattggggttgaagcttcaagctgaagctcagaaaatcaaagcagccagccattaattcttacctctgcctcagctcagacgaaaaggggtgatcctcaaactgctcccgatttcactgctcctcagattcactcagacttctatgctctcttcaacatggctagagactcaatgccttcctagcctcaatgtggctggagaatgactactagctctgataccctgtcttaaatacctgcattgagtcctgggattaaaggcatgtgatcccaagtgctgagatcatctttgtttgagctgtttctctttaggactggatatattttgtgtaatcagtgtggccttgaactaacagagatccgcctacctcttaatcctgaggccaaggattaaaggtgtgtgcctggcttttccggcttgtggctgactttgctttcctaatccttaggcaagctttaataaatcataaataatatatcaccacaacttaatgcatatggaccctgtgctaaacagtgtatagaattaaccttattaacctgcccacgttggtagtatcattcagtagcccacaaggagtcctgagcatagaagagcccacagtgaggaagatgacagatttgaggcagatatctgttgtgtcacatatctgcatctcaaaaaaagtcacaatcagtcttgtggcaagcacaccaagcctagggacactggtgcttgtgttcctgggataaactgaatatgatttcctcagaatctccactcataacaaagagcccacttagatttttttcgttaatggtggtttccagccagtgcattttaaaaacaattttaaagaaaagttgaaacagttttgtttgaatttaaattaactcaaaccaaagaaatgaaaggtacagtttccattgagacttactctcccatcagagggatggcatctggaaagttcttctggaagaagtccagcacatcatcacttgttggaagtttttcaaagtcttcgaaggacatgaacaaggtgcatgtgaaagatttgtcctgtgaaggagaggaacagggtgagagagaaaagagactgtgaggctggcactaaggataggtccctaaaccacagagccctcgctgggactaaggatctcctggaagagaacgtccaagccagctttgtcccttttccctggaggacagctctaccatatctgatgtgcaccttgattcttgggtcactaggagaattgctactgtgcaaactatccatgttcaccaagtaaatactgcagtccttagattgtctatagattgtcttatgtgactttttttcctcctctttgtcttcatgggaaattattgatcctatgatagacagcaacaggaagaaaacgactatcacagaacacagcaagctggatatataaaccctggagacaaatgaaagaacatacacacacacacacacacacacacacacacacagagagagagagagagagagagagagagagagagagagagagagagagagagattctaatgtcccacagaccttaaagattggaattgttttctaatacacaacctaaatctctttggctttattgtggcgcttgttcctggacttcctttgatggagatgacagcactctagatatgaactcttcattatccatggcagaacagtctcctttctaaagtaaatatcgagcttgcttctggtttttcctcagaagcccaaagcttcaaaggcagaatcattaaatagattaaataatgatgaggtcaactaggttacataaatacccaacacaaaagtaagtaatgaaaaaatattaattatagatgtattagtagctgataggaagttgtacattaccatgtttggaagggcaatcatcataaaggcgtttctaggccaaatatgaagataattaggctccatggcatactgtagggcgaagaacacaggttcagttagcaagggattcatctctaccatggctttgcagtgcttctgcagtaatctagaccattcccatagatctggcaccttgcacctgtgttgttgctgcatgaagtagatactgtcttagaaaatactttgggccctatctttatacattcaaacttggcaagtttttcctaagcatttatttcaaagtttgagaccatactataataagatagtgttcctctttcatcctgtctttctatacacataaatatgcaagtcaatatatgtatgtatgtccatgcacataaaaagaacatataagacatacatgtgggtagatatttgtgtggggggattgtgtgtaataatttacacccagggtttttatagactgaacagaaaagtcttgagtctaagtagcaagaacaaaactgaaggaacggtacagtctcctagctacccttatcatgacaaaggtctctatctacctggcttcactgttcttctgttgtttgtatttatttgttgttgttgcttttgtcccaggaccctaaacaaagcctaaaacacagacgctgagatgaatcaagtgcctaggtgtttggtttcaaagattatacagtgagtagagggacgagaaagtacagatgccacaaaaagccaagtcacttctgcttaataatataaaaggtaggaagacagggagagttttgatgccaactgaaagtataggaaataacgtgtaagtggttaaaacagggtcttgtatagaagaccagggcacaagcgagctaagtcacctttcacacacacccccacctgtgcaaggtagagatgcacctagcacttggatgggagaggagaaaataccctgcgtgtccctcctgccaccttttgtatttttctaccaccccctcatcttttcagaactctgaaaggtaagacaagaaggaaaatagaaagagaagctaacttgacttcccaacacaagatcaaaggccggagcttgattataatagcgaaaaagacaacctttaagttctgtcttcctcactgacacaaagaatggcttttgtatcatggcaaggacagtatgctaccaagaacatatgaagttcacaagtaggcctggagcctagtaggcaacttttaaaactcagcttctttattagcaaagccacactcccgagagatgcctgtatgggacagcagtgtgagggcagcctaagtccctcaaaacctaagttcagatagctttctgattgtgccagaacagctcagaggtaacccttggggtgtggaaggagagaggggaagaatgtaaggatgttgaaatggtgtttctagacatggcatggctgttatactcaagaactcacagcatctgtggcaacttgcacaagacctacacaaaatcaagctgtcttaaatttacacacagataagggagatgaatttcaggcacggtgtcttcccgtggagcttctggcaattgatagcaaaggccagaggatggataatctttctcctggatgattccgtatctgtgcacatatgagcagcactagctggacttagtgtgtgaaaaaataagattaagaataaaaagaggaggaggagatgaagccaggagggggatgtgtccagaggagataggcagttccgtcattgtatatatacacgcataaaattctcaaagaataaaataaaataaaatataggctttatagtaaagctaagtttacaaacctttaaaaaatgaaaagaaagaagatattttcctaataatacccaaagctgtagtatccagtctttcttcccactccacacctcagagacggagggcaagttgcacctcaaaaaagagcgagaaagaggagagaggaagcaaagatctagaaaattccaggaagtgatctgagctgatcttacaaacatatgttttcttgaattttggttcctagattttacttagatacataaaatcgtgcctatatatagaaagtagaagtaaaactatataagggacaaagtgggagaggggagaaaaaagggcagatgttcctgggtaggaatatgctgagtgcacaatacatgtccaaaaacttaaatatataaatgctttcagaagagagaaataaaaaaaaaaaactattgcctagaattgtttggggtcttgttaagctgtcactgtctttgggccacatttgtctcaagacactgttgtttgaaaaaatgagaccttgagaagaaaaaccctactaatcattaccaataattacatgtggctgaaatgtaagtgattaccttacagctaccttcttgggcactgttctgctgacatgagggctggcctgtcaacagaactatcttaccctggaatctagagttaccagctctccaactgtgagtcgggagcctcatacaacaagcacagagaaattagtggatcgatttgatgaggaggaagaaatagacaatgagatgtaaaaaatatccacttgattgccctgtacagtatgttagaatgtaactcctctgtctcaattaactagatattttatagatgacttacttcatctaggagagatgaaatcagatcagaactttagaatgggtgttttggatgcaaattaagcctttgatgttatccactctgtcttataatttttaatgtttttatattatctctgttagtatttcctttttcataagtttctgtttgattatgacagagtaaaatagtttcattttattttttaaacataaaattttatattaaaataatttcatagcatttttttgcttctggcacagcatattctttagtaacggaacaatatgggaatgagaaaaattcaatttaaatatcttttcagaaatacattattaaactactccactagctctccttaaatgctcctgtgggggaagggctacaggaagggagaagacctacctctccattctttggtgggattgtcaactccatgtacccatgagggatgtattgctgactgtaatcaaagcggggcttcttcatgaggtgggctctgacagttgaataggctccatcacatcctacaatgaggtcataagtgacatctctgggaactttatcaggtctgaaaaacagaatgaaccattccccgccaccaacaaaaacatctagtgaaaatagtaatatatttctacttgggtgtaaaaagcaaacgccaaaggtaactcaaaacacccacttttacacagctcatttagagcctgactttatctaacttgaattaacagatttaaaattaagatggaaatgctggtcccagacacggttttacttttgagaatgagaataatgtgccactaccctgatactaaagacagatgtgcttgctccagaagtggacagagctgactgaaggaaaccttgagaagacgggaaagcagtccagaagtgaaggggtaaagacatctgtctgtaagtgtgagtgaatactgcaagtgtgagtggacactgaagtgtgagtggacactgaagtgtgaggggacactctaagtgtgagtggcctcaggagcttctgcaggcatgtgaccagggtttgctggagaaaacaagcttggtttgagtaaaggataccagataataagcttaagagtagaacacacttgccccttgtcgatttccaggattggttccagaatatccaaatctgcagatgttcaagtatttgcatacactcagtatttctacacccaccacaccccctcccagatgctccagtttctctctaggaaagctgtgtgagaggttgaatcatcagggagcaagaacaagagtaaaaagcctttgcatggtcagcacagaggacttcttttattgttgtgttttcttggagatgccatctctgttttggatacttttatctgaggttgcttgtaccagtggttaaagcatccgtaggttcagaaggttaactgtagaaggcacagagggcaaagggggagataaggagaattttggatatcaagacagaagtttaaattcatgattctggcaaaaggcagaaaatgatttcctccattagaaggatgatgactgaagagtggcagttttaggaagctgacttttcaatctgaagtggaagtggggacacacaggagggatggcaaggagcccacacgtgcagggacaaaagctggacaccatcggatcacaggaagaggaaagcgtagaatgaaagacgcggtgatgagaatgtacagatgtaatgggagaaaacaggggagccgagcacaccatgaggactgattatgccaaaacattcccagggaagaccggaatggggagcggggaactgggcaagagagatgagaaaggctctaagaatccaagataatgcagctatagttggattggcacatcattgaccaggacctcactgagactgagaatgaggacagagatctgggcacacatgttaatgccagagatacgaatttacaaatgattgtgtaacccgagactgatgtatggtattccgaaggtgggactttaaaaagaagtcacgccatgaaaaagaacacgagacacaaggctggggagggcctcctctttgcaaggaagagagcgtctgaacagagaaaggtcactcgagcgtggaaattaagaattaccagttcggggtactcagaaagcatctggggactattctcaaacagaaaggcctggctgtgaagactgtttgaattctcgcttcagtaatcattcaactcttccaaaatagcaaaaaacaaagtttgcaggtagagttctccactcccacccttgccctctgaagccaaaaagcctgaatggtgattacccaagcacggtgaccgccccttcctcgggacggcatttcaacagcttgtgaccaaagtgcaccttcgcactggggtatgactccaccgctgagggaagaaacagaaggtaaacagagctgcgtttcaaatctgactgtacctaatcaaactgaaatgctggtcatttgcttccaataggaggaaaagatactacttaataatttgtgacagggtcttatgtagtacaatttttttttttttttgctgttttttgagacagagattctttatatagccttggctgtcctgaaactcactctttagaccagactggcctcaaactcacagagatctgcttgcctctgcctccctagtgctggtcttaataggcatttaccatgacatctggctatttttttttaattcaagctggacatggtagtacatgggctttatttttctttttatttatttttaatttattattattattactattattattattaattagcttgttttgttttgttgagacaggatttctcagtgtaacagccctggctgttttggaactcacttacagaccaggctggccttaaactcagagatcctcctgcttctgcctcccaagtgctgagattattgtgtgccaccaccaccaaggaagacacttattcttaatatgatatgaatttgttaaaatggtgatttgacaaccattttgtggatagtctagtataaattctaaaaaatacagacaaatgaaaaacagcttcaaaaatactcaactaatagctgaacaaactccagcatccctgtgattgtttgtgctcctggaaagaaacagttgtcatatacttcaaaagttgcctttaaggctctagttgtgactggaaacattcagccattaagaatactccctccagtatacatgcctgtctatctctttctccttggggcttctgactcatggtactcccagtgccatggcacttggatactaagtaactgtagaaccagccaagcttggtgtagtgtggcatgcctctaatcacattttacgggaggctgaggcaggaggatcatgagttcaaggccagcttgagctatgtagtaagactgtgtctcaaaaaacaaaaaggaattaaaaagaaataagaaaatgaaccactaccccccttccctgccaccaacaaataatctagtgaaaatggaaattatttctactaagattaataatatatttctgaaaagcaaaataaaaaagagaaaagaaaaatgacaatttctttgttacataattgcagaaatcagatatgatacagttagggtatctttctttaaaaagttagcttttgttattctgggttacaataaagacatgtttatataattaaaacattacacatgtggcttggcatttgtggttccagactagacagtgccaccttgggaggttcctagggcagaacatgacataaagatcttgagaattgtttttaggaaaatatttttttaaagtgtcttgatacaggaattactgaatgtcccaaccacatttatcttcttttccttgttattaatagcaaatagatgaacaaaccacgaaacactggtacatgaaatgtgggttcatctgagaatggagttcacttacaatgtttttagaggggaggttattaaattagagaaaaataagtatggttgatcaaatatgtggaatgggtggatcacatgtttcatgccttgcaaaagagattcatctctctctctcacacacacacacacaaatacacacacacacacacacacacacacacacacacacacacacacacagatacatgcacctttttactaatttagagtctgcaaagcacattctcaaagaaaaacagtgtggaaatgtctgtcatgtatctcaagacatgaatatatatatatatatgcatattatatatattatatatatatatatatcactctttacactctttactattagctggtgtttcatatataataataaaggcagaaactgagtcgctaaaaagcagagacttgggaataaacagataaaagctcaactctagattctaccactcataacagtaggacctaagatctctaaacttttgtttttccatttgtaaatttgagataaaacttaattcctgcctcacatagctgttgggagggttgtggaagtcagtgcagtgaagcacttgctatagtgcctggtgcttcagtaacatcttgctattatctttattttagtaaatccagaggatgttaaacaggtctgtgacattgctattctaaaaagctgcttggtttatcttctttctaaagatggacagggatgtgtatggtccactggccccactctatccactgtctagctgaaaaacaattccaaatataactagagattaaattaatcctatggaacatttaactttctaaaaaagacagaggcaactaggacgtttcaatatgggttggttaaaaagacaatagaaactcaaccagagggaaaccatgcttggtactgagaacccagtcaactccccaaggccagtgaagtcatggatcttggaggagaacctacaactgatacttcactaaaccagaataatccctaaccagtttctaaacatttgtcttcatacccacagattaagtgtagctctcacctctcatcaaggaaatgtctctttgtaacaaatggagatcattacagaaaactacaaccaaacaaaatgcagagtcgtggagtccttccaaaggatacatctacaaaacaggcctccacctactgctcagggaacagtgtggaagggggcagagagactgaaagaaccagaggatgagagagtttgttatgagattgggtctcctgggaatgtcagaagttacacccataaagtcttattgacatggctgcctaatcacaagctgaacaaggacaacaaagaagtggatggggtgggagccattggggccccaaccctacacagagaactataggcaaggcaagctgagaacaggagaaatcagttgtctttcccaggtttggtggcttgaataggaatggccccatagacccatgtgtttgaatgcttgacccacagggagtggtactattaggaggtgtggctttgttggaggaagtgtgtcactgtggagatgggatttgaggtctatgctaaagacacacccagtgtgggacacaaagctgtttctgttgcccaaggatcaaaatatagaactctcagctccttctccagcactgtgtctgcctgattgctacctgccatgatgttatggactaaacatctgaactgtaagctccaatttaatgttttcctttataaaattcgccatggtcatggtgtctcttcacagcaatagaaaccctaagacaccagggaagaacacaccaattggttatccaaaaccaaatggtcagccctgaaaatatacaaataacattatacagactgaaaaaagttgtatagagatatatacctatatctgtatctgtaacaacaattaatggaaactgatgccatgtatttgaaagtgagtaagaaaggttttatggaaggttttgaagtgaggaaaggaaagggggaaatgatgcaattatattatctcaaaagcaaaagaagtttttaaaattaaaaaaagaagatagtagaaatatttgaggggtatgctatgccagtagggaatttgttctgtataatcattgaactggtataatctactgttaaatgtaatgaggactgaaaggttactaggggaaaggtaccaggagtgtgaaaggttaccatgggtgtgaaaggttaccacaggtgtgaaagtttcccaggggtgtgaatatttaccagggatatggtgggatggttaaacttgcagatttacttaacagccagtagcttccagtttattggtagttcttcttagttgctcagaggacaatcttgagagctagatcttccatcttcctctttctcagtcccctcacacatttggtcttcttcagacctgagtctgccctccccttcaccacactgctgtctaactttgttcagggcctgggctaggcatttggggactgtggcaatgccctcaaggttgcagcctcctctcagccttcacatcttatcttcctgacatgcacatctaacggggcactaggcaagttgtctacttatgtctattgacccatcagactgtgagttcttgaccagacaatggctggtagaattccagtatctaaggaatgaattattttcacttaaataattgatgagatgaaaagagacattatggcaattttttcacttttcaagggctttgtactgaatacaatcttattctttatagttcataaaaaggaacaacaactaaactctaaactctattaagtcatgacgagctgagtgaacaaaagcattaggcttaccagtcagtagatccttgtttaacttttctctgcttatggaaaggatatactgtaagagaaacaaagtagacattgtttcttgaggggcaaatcccactctaagttactcagaaaagaaattttcactatttagaaggttgtaaactagttttagaaccatttagctaattggtataataataacaacaataatacaatgacaacaaacaactttaaccaactatgcttaatataatatccacatttttaacttaggctttctcaaagtttgattcgataagtcaaatccttctcatacactgaaaatactggttttattaacataattttaacattgtaaatttcatatttccatcagaactctaaaaatggttgttacttgcttcactactgataacatcagagcaaatgcactgttcccccatccccccccccaaatctacctccaagaccttaatttcagagaaaactgtatgtgagagtaacacggggtagggctgggggtttaggaaaaggacagtctttcagaccttgtggtaaaatgtagcaggttgactgtcctataatgccaggcatacatggtgtctagggaccaaaatactttaagcatcgattaaaatgttttatttttagtttagtttaaaagcagaaagaagaaaatcaagtaaaataaaaactgatctataataagtcataggttgcttgtattcatcatcataacaataaagtcataaaaagttaagtttaaatatgaattacctcttggcaagcatacctaccatggaccatgaaagtcacaatacagtcttatgatttagagtgaagtcattaagtatttaaagcatatcatttttccaaattatgggaaactacacagtttttattttatttttatttttttcccacaggactgtcttttatttttttcttttttgttttatttgagttacaaacacgattgaattatatgacaatcccagttcccttctccctcccttcctccactaccacccccccaactaaaaccctacctatcttatatcctttcttctaatctacaccttactcaacctttctgctccctcatgacctctgcattcttccttttcttcccttctcattctcgtagctctctcccccctcttcccatgctctcaatttgctcaggggatcttgaacctttccccttctccagaggacaaaatttgtctcttttagggtcctccttgtttactagtttctctggcagtgtggattgtaggctgataatcccttactctaactacacaggttttaacacaaaaatattaacataggttcttccactcattctgaagtagaaattttaccttagcagccaaatctaaacttggtataaaaataactcgggcgtaccacagtgacagtggttagggaggtgcttgtttccttttcgacaggggaagacaatgaagaggttccttcatcttggatttgtgctgaggctgtttctaggtttaactggaatttgatctccttgatggagaatcccatggaaaacagcccaactctatctaggaagcaaaggtcggcctgtcccagccaattagcttagcctttgttaacactgcttgtttgttgtggaatctccctccagctaaccacttagcttctgttaaaagtgcttgcttcaaactgcttactctgtgaaacccctccaccccaccttggatgctgagcaagatgactggacaaggcctctgtcctaaaaaacaaaaccaagttctggacacttggggtctaacgtaggtccccggatacttgggtgtagtctcagccagctggaataaaggctctcaatgctatacactgtctgagtagtcattacaggtgagcttcctcataacgctgatgtaagaagacagacctcttctttgcctcacagttctatttccggtgtcactgcatttcagtggaaatcaaatgtgagcatgaaaggccaggggctacagctcaagggtagagtacttgctcaacttgtacaaggccctggtctccactcccagcacaacaaggaaatgctatagatgacattagggaatgttccaattataaatttgtttaaattaatgtggtgaaaatagtctttgcatgttggctatagggcttgtgtgcttgggaaccaatagacatagttgtccaatagggccaccaagacttctctaccattgactccactgtcgggatggcattgcctcagaagcaggagtcagtgttgtcttgtcatagtacatgcctccgacagctagtctaaaaggcagatccctcagggaactaataagtctaaaggcagaaagtggctgttctgacaaaaacaaggatgaccgtatttcctcaggcagagcaaccgagtggttcaaaataacttgatgtagttcttaaagggtaaagtggcctttaagtttgactaaaacacaacagatgccaatgcagtcatgtagaaactgaagaatgagggtggctgtaaacttagcactcacccagtttgtaagaattgagaaatagcattggtggtgggaaagggaccgcttcctccctattgtagtgaaggctccaaaattggaaccctcctacacctggtccctcttggggaatcaatccccactacaacagctgaagaaagcattgtggcctcctgtccctgtcactttcttcatctagtttctgtggtatttggacacgtatctgtccactgatacgtgattggacagggctctggagtgaacttggttggacagctcaccatccttaggatgttccatggcaatacaaaagaatagtgagttgatagtgtgagtcacttgccagggactcatagagcaatggggctgtaggcagtgctgcccaggcttccgggtcacacccctgagaagaaagctgctttctttgtgccttgatgcatctcatgcaagtctgcaggctgttcctcttctctaaagcatggttcaagttcaataattctgaagattacgctatgctagagtgaatttacatgacttctctatcaaacctctgatagacactttgcattttggatttaagtcttagaaatgaagttctgcccagctttcctccatttgattagggtgattctattttgctactgctttaaaatttctaccaagtgtttcagatttttaccttctctgtagactttccatgagctacaacttccccctttctccaagccactgttccatttcctgaccataccacacagtgaagcctcccctgtcttactctactctactgatgcttcttctccacgaaccagatggctgtcccttgtccttcagaagaatgtgaaccttactcaggctctgtgcttcataaggcagggctccagaaaaaacaaagcaaactgggaattcccctcttgttggcggatgtttggggccttcatcctctttcaaagaagtaaacccaaagagtataattagatataaatacatgttctcccagctatgaatgtcagcaagagaaaggccagaaaaacatagagcaggataatggatttgctttcaaagaccacatcaccgtctggcctctgttgttttgggaattatgaagtactgaaagcttttctggttcattctatacatcttattataagcaaatccagggcaagatggtaatttaggggaaggcaactgcagtgccatgtgccccagtgtccttgtacatgatactcaacaacagataacatggtaatttcccaacacattgcaggtgttgggctcagttagaactgatgcattcataattcacttcctcccatgcagacctacctgagacttgttcccataaggaatttcagacttctttcctgagagagagtggatcattcttgctctcatgggcacacctttggaaacgatctgagaagaaccagaaacagctgtttccatcgccacgacataacaccatgagaattaaatagatgagtatgaaaatgggatttttcagttaaacctctaaagggacccaggaagcctaatgtggttgaaaagtcactcagtgactactttgctccagaatatgccagtgtttctttaaattggaagaaaatgaacatttctctggcttaaaccaggtattgtagactcgggggagtggttaggtgctagagatattgagttgggggctaaatgattttcttatgactatggacagggccattgtgaggagaaaaatgcaatcctccctggtatctgttgtatttccttggtgtgtgaactctctggttagaggtagtattgcatgtgacagcaagcagccctgccttcaagttccgtttctgacttccctcaatgatgacggtaccctgtaagatgaaacaaagcttcccctctcctaatttgcttttgatcagagtgtttcatcatagcacctgaaaagaaactacagcacccctacccaaccaatcagaggtgcatcttcctgtaagcccagtgtgagacatgatatcagatgggatcgtagtgtcatgtcttcaactccctgccccatgcctcaagtctccagccccatcatgtgttaggtggtcactagcttgttgtctggaattttccaagcctttgctgaatgaatttttataggcaggtcgctggtatcaaataacatttcatatcaggatgaaatcagtgccataattgttgaaaaccatcgagtatgtacatctccatggaaaacttacgaggactagggcaatggcttagtgagtaagagtgcttgctgtgtgagcatgaggacctgcatttggatccccagtggcaaacttaagcgtcagtgaaagaccttgtcccaagaggataaagtagagaatgacagagcaggacatccaacaggttcctttggcatttgtgggtactagtgtaagtgtgttcacccaacacatacatgaatacataggtctatatcacacacacacacacacacacacacacacacacacacacacacacacacacacttttttaaagaaagcaaactgcatcaacaatgtacctgatcttccagaccaatggccttcaaggcttgccgtcctctataagaaagggccaagttaatgcttcttccatgtgtaaacttagccactcgaatatctaaaaacaggaaacagattctgtgttgcacacacttcctcaaatgtggctaaggagtacataaacccttgcatttgagcaattgttaaagtcagagtcaaattaaaagactcattaacttgtctaaacaaaataccaggtgtaaattagtaagtttagttcactgaggcattaaaagtattctaatagttcctatatcttaaatttctgacattaaaacttcttttatttagaaaatccaaagaaatagattaaagaatgggaaactcttcccccattctctgttactgacttaccttccctggcttcatacacatcaacttgaaaattcctctttgcaagaaagcatgcattcaatgctccaacctagaaatcaaaacaatctttttcatgtcttcatctggttctgtacattcacagatactttggtggaaaacatactattgtgtattgatggatatatagtccattcattacatggacgtagttgtagtcactgcccaagaagatgaaaggcaagataagttagatcatatagacctgattttgtaagcctataatccagctgaggtaggaggttcttgtgttcaagacctgcttgtgcaatttaggaatagcctgtctcagtatcaaaaggtaactgggaatattacctctgtttagcacgagcaacactctgacttcattccacaataatgtaaaaaaaacaagagagaaagaaaagaacaaaacaatcagattaattcaagattaagtggtatagttgtagacaaaggtttggcttttcttctgcaaaggaggagacaggtgttggaatatttaaagaagaccttttcataatcaaataaatgagaaaataccctgctagcatcccaaaatggccattacaaaggaatgaacaaatgaattctggtgtatttacacaaaagtataagtgaagagtgagttacagatgattcatactatgtgacattcttacaaaaaggataacagagacacagccatgagtatatgtatttaaatatatcattaaaatatgtatttacatttattaatgcatatatgatcatatggtatggatatgagaaaaatattaattaaaaggaaaatatccatggcagtgttccagtgggtgaggaagaagaagttagtggaagttcttgtgttgagggtgagctggcaagcacttattattaacaaccagctagcaacaacaacaaaagcagtaactaggagcaccttctttaagcccagtcacggtagtatatcaaagactgtgagaattcctgttctgcatatgtggtgttcagatgaagctaagatgaaaacctaggcatgtatgttcaccttcacggtctggttctacagctagggatgtaggctttaccctttgaaagtgttatttcttctcactttctggagaaagtgaataatttggaataaccggcagtgtcatcttcggctgttaggtggtgaagtgactaagagacaggaaatgtgatgtgtaaagcactccaagcttcccaagactctgtaaaggcacagctggattcctgaccataatgaaggagggtggaggaaggaggaaactgggcacactaagcaggacctcaggaaggtagcccctcttaggggcgtggacatttatgaactgattctgcatttgttctaaagtactgcaccaagaacccacaccagtaagcggggaacaaatgaggtgtgaggaatacattttttgcatgtaggcaagactggcttctgtgaagtacttcaaaaacccaccaagaccattggagagataaaggcagaggacatagagttaaaacttctctgatgaaaccagagcctcaaaagatggagggagattcgtagaaacaacaaaaatgtcccttgacaccccccccaacaaaggaagatagacttccacagcccattgaagtccaccccacctgttgtaagatggcctagggatggaatgacagagaggaatctcagagcctcaagagtgggaaggaaaatgaatggtcacacagaggatccttgttaaactaaatgggtcactaaacaaaagcaaaattaggaatctgggagacagataaggaggagggaggtgggagagagattacagagggtgggaggagagagtaaatagtatgcattttataccaggaaactgtccaagaactaacttaattaaaaaaatctagaaaagaaaataaaatgtggcagtgtacacaatggaattttatttagctgtaaaggaaaatggaattataacatttacaggggaacagatggagttggagatgattctattaagtggagtaagcaagatcatgaagataaacagcttttcctgctcatatatacaacacaggtttaagtaagtgtggaggggggaagaggtctaaaggaggcaggggggtgtatatgtatgacataaaaatagaaggagagaaggatggccagcaagaggcaaggacagaggacagggagggaactgtatgaacgatgagcgaaaaataaagtataatgacagacatgttatgaaaatgtaacaaaaagttcatttctttgcaaaacataatgtaaaatatcaataaaaaactgaatggaaatttattttagtattactaaaataagtgcactaaggaaggctaacagcatgtcctctatgtgtacatatcagtagcatttgtagaaatgatagacttgacctaaatgacactgtataaagaccttggcccaagattacatgagctttgttgaggtctatgcatcagggatgtttctttcaggagaagtgaaagttctaatgacctgattttggcagtgggaaggactaggtggagaataatgtagagatctttgtgtgaggagtccaaaaaggaagaagagttgagttcaacacttgggatttagttttaacccaagaggaagaaattgggggaagtagaaactgaggaaacccaagagccactgcctggaggcagacatgcctgttcctttgggctgtgcacactctctaggctgagtttacactggctatagtgtagaaagatctccaggtcactgagcagcaataacacttgaaaccaatttagcatcaacagcgttttgagtttggaaatcactgtcagaaacaaacacagcaatgacagctgaggagcttcagggcatgtgtaggaagccatttcacagcagagaaagagtttgagtgttattcagggagaaatccacagaaaactggctcacttttgcatcttcttcaactctttgcagatttgttccctcccttcttggatttctgagatgcttaaagagacatcattgctgctacccttgagtaattcatcaatgtacagcagctttctaactggtcttatctcctcctaatttccccagatgtttccttaaaaagcttgcagaatgtttgtttgtttcgagatagggacttgttatgaagcccaggcttacctggaacttttaatccctcctcggtttcccagttttgactaacagcatgcactactatgccaagcatgaaggatctttctaaatctaaaatcctcccaaggcctttaagagcattgcaactttgagtaaaacacagccttcttccctgatcctctcaaatgttgtagacactggccatgtcagctttgcatctcatgtaggtgtctggaattatcttgtcagagggctgtccttgatcccactacaaacagaaactgccaagacctgctataagtattgccctgtttgccttgttcttgcatctccctgcaatcttgctttgttctttattgcctttctcctccctagaatgcccactcctttatccgtaataccttaaacaccatgggcagcaaggtatacatgcattctcattttgttcaacaattcatagggaagagctagagctaggcctggcctgaagcctgacaaccacagcaaatagtgatcttctttaatgcttggttttgcttggctttgctgagacacaggatcttactgtgcattccacataggcctcagtctcagtctactccccagcctcagctggccaagtccgagcgttacagatgtgggcagtcatacatgctcatttcgaggcatttagatatattaaaggacctgtcatatccattttcctgcaagcaacataattttatcattctttatgggagaataataccagtgtgtggggtgtgtgtgtgtgtgtgtgtgtgtgtgtgtgtgtgtgtgtgtgtgtgtgtgtgtgtgtaacattttccttatccactcattttctggtgggtacctaggctgagtctgtaacctagctgccgggagtactggagcagtaagcacggtcatgctagtatctctacagagagctgacttggttattttaggtataaatggagaagtagtgtagctagattgcttttttttttttttttgagacagggtttctctgtattgctttgtattgtcctggcactcactctgtagaccaggctggcctctagctcacagagattcacctgcctctgccttccgagtgcagggattaaaggagtgtgccaccaatgcccggtgtgtagttagattgtagagaggttctatttttaatcttaaggagcctctgtgtgatggttttcatttattggaatatttttattctatcagagttctactgagcagaaataaatacagtttttttggggggggattagctttggctgtaaaaatatggcacacattcacactccttcctactgttgggggcaaaaaaatcaacacaatctcacatcttgctaggtgttagtgacagccctgtcacctcacctgctgaggtaaaaagtaaggggctcactcaccaccccatcacattggaattgccaagtaattttggtgagcaaatgtgttatttctcatttatctgaacagctagtgagtatctgataagttttaaaaaactattaatttcatgtgtcttgaccctttcttctcattagagagtactgagttattaaccagagtggggcaacacatagccatgtttggtagcaaaatcaagttcagtttgttttatttttgttttttaggaaacactaaaccaaaacaacaaaagaaaacagacatccttatgcttagtggatacaaaaatacctttcccagaaaggacaatttagaacaaatgctgttacccatacttattgctgaggtggctgccagtgaatgaatggatgaagacaatatggtacacatacacaatggagtaagtagcatttagccataaagaagaatgaaaatatgtattaggtccttttagtaaaatgggtggatttggagaacatcaggctgaatgaaataataaaaatacatagagacaagtactgcatattctctgtcatatatgaaaataccaacacacagaggaggggaaagaaaggagacctaaaaatttagagaaggcggtgtgagagaaggaagggggtaaaagggaaaataggcatgattagtgtatggacatgtgtttatgacaatatcagcacttattgtgttaattgtaataaaaacaatgctgtacttataataggtatatttaaacattaaaaagtttaactattagaatcaatcatctacacatgataaacaatcattagtgagataataataataatcaaaatcacccgaagagcaatacacgtctggacagtcttaccaaaccaccgccgataacagccactcttttcccttgagtatcatcagatgaggccatagctgcccgaacacctctgtccaggttggaactctctgtcctacatgctggtgttttgcaatctttttattgccagaagcccagggcctttgggagccctagcaaggtttggtcaaagctcacttcctcggatagtgtttaacccgctagaagcccaaagtccgatcagctctgctctcagagacaattcattgcgataaccaaaatttgaaaaacccagccatgtagaagacacgtttttttttttttttttaaataacagtcttggggctttccttcttctttttctacggcatctgttagtttcattttcattcaaactacggttatgaatgaaacttgtattgtctgaggtttggaagcatcttccacctctcagagagtgagaggactggattcacaatttatccctgctgcagagacaaacctagaatctggcctgaaaggttcttgtgggctggttgcctttggccgtctctgctgggaacttttttttttttttttttttttttttgccatcttcatagtttcctgtttgtagatgtgtaaccagctgagcacatttctcgttgttgtggagttttagcactggactttagattctagcttgtgcctgccatggacaaaatggtgaacacactgtggggtctagacttgtgtctggtttcagggcatctcatcactcttttgacttttgagatgaatatacttggtttgggggcgagtattcgtgagttgtgcttcttttctgggacgtattgtcgggtagaataaaatgaaagcatacatgaagatttatttcttttatttttggtcagatggcgaagaattcacttggtagggactggaaggaaacccactccatagcgccccttctggtgagtatgatagaggtgctagcaaactgagtatttagagtaggtatcacatggcaatgaagttaaagacacagcaagggcacacagggaagggtaattctatgaatcctgtattcttgggaacctagttcttttgtccagaaacaagcatctagcagtggttttgctgtgtggattaccctgttcccctccaagctccgagtcgccccccgcccctgtttttcttttctcctccctggccctcttttcttctttccctactttgccacctgacgtcactttcctcttttctcttccttcctttccctttcaatgtcatgttagcaaatttcacacctcttcacaccccatttattttctttcgattaacaacatataactcaatagttctttagtatcaatatgaaataattgtatctttggagaagcttttcaaaagttaaggacttttacccacagaagtaaagtacttaagcacaaatgtaagtgtgacagcttccttcataatatgtgcctactatggaattcgaaggaaaatattgccagcttcccagaaattcgctgccccagacccctcattcccttacagagtggccaacatgccaacattatcttcttgtttttgtttgtatgatctgtgccatcatacatgaaccttagaaatagtctaattttgtatctctttttaaactttactatacatgaacacataagtgtgtgtgtgtgtgtgtgtgtgtgtgtgtgtgtgtgtgtgtgtacacgtgcacaagtttcatcactgggaattgaacccagggcgttatgcatgctaaacactctagctaccattgaatatattctcggtcctgttttgttgcatagcttagttctttttctcaatggtatgcttcttaagatccatggctcttgtttgttacttttcgttgtcatagtattactttcccagggttgccatgttctaaatcttgaggtatttcagattcttggtacagagcttactatgttcttccttggaagattctgggttcttatctttgcttatggagttccaacatttcatgttaacatactttgctctggcttgttcagatttccttgatcaatggaatttcttcttttaaaaatgtatctgtgttttgagatcatgtgtatatgtgagggcatgcatatgacagtacatgtatctgcagagttctgaaggtgcataggatctcctggagctagagccacaggtggttgtgaggattctgcagatgctagggaacaaacctggtcccctgccagaaagcatgtgctcttaaccactgaaccatctcttcagttccattggccctttcgggaattcattggtttaaagtttcccccaactttattcctgtatatcatttaatatttaccagagcagactgctaagcctatgaacaaatccatactgtttttctgctctaatttttgagagaaatttatgtttttatcttatagacgtcctataattttatatatatacagctttttattgttgtatcttaaagtttcgaaaaacaaaagaaaacaaaaactcctttctaaccaccccagcaaggtggtgtactcacacctcacggtctttatttaaaggagggagaggtccccccgcccccagtctctttcctcactgctagattggaactctgaactttgtgcatgtgttttgttcctgaactgttatccttaggcccagaatgatttgagcagacttgaaccttgctgtcaattgtgccagctgggagttgggatttagagcagaagagcaaactgttaggttagcactcacctcttcaagcaggacagaggtcataacccataaagaacagagtgcaaataaactggaaacacaaacaaatcagcaagtgtcaacaagaacaaagcaggtccctgttaccagacaagtccagagtttaaaaattgcaactctaagcaatgcaaaaacatgcttttacatagatataaggttgcatcctaaaataaagaggtacagtgccaaccattaatgaaaaggctttaaatacattttcattattgacaacaatgaactaagccacatttcccacatttcagtcacttgtattctgccttccctacacacttcaccttttgttactatttcttcatgtccctatacattttatttaactaaaatggaactttatattgctactacaagtagaaatttaatttcattaataaatagaaattaaaagctaataataggaagttcttggatatcaatattctctttgtaaaaaggaccatagtgggtactatctcataaaattgacttcagtgtttaatgaattaattaatacattttaaatgacatgcacatctgcaatcccagacctggaatcatcgaggcaacaagacttcaaattcagggccaacctgggccctgaaatacatggtatttcaacaaaataaaaaccataaaaagaaaaacctctggaatattgtatgtgtcataggcagttgttaaaaagatattaaatatcccactcatagaaagctcatcgtaagggatttgaaaaagttaaactgtgcagtaggaacaggagataggtttgaaacagaaatgaaacaaacaaacaaataaaccagtattaaaaagaacttaaaatagcaaacagtaatacaaatagacacccttgggtcctggagacagctcaacaggtaaatgtccttgccgctaggccggaagacctgagttcattccctgtgtccacagagtggaaggagaaaaccaactcccacaaattgtcctatatgtatgtgctgtggcaccaaaacctaaactaaactcacaatgaaaatataaataaaaatttaaattcatgaaatagaatactattaagttaagaagatcaaggctacattctcaacacaggattctgtttcagaagcaggctttaaagttgttttattttattttatttttgaaacaagggtcttattatggagctctggctgtcctggaagtgactatgtagaccatactagcatttaacacacagaaatccatgtttgtgcctccctagtgtggagactaatgggtgtaccatcatgccaggcctgagatgaagttgtaaaatcattgtttctgaaacaacatagacggatacacatatgaagaaaatgagggcctctgtgaagggggaaaagaaaatgctgctgaagtttagaaatgtatcttgtctttcattaagggtatggaacaaacacaatgttgtcattttctaggaaatgacagcaatcggtaaatgtttgtgttattttgtggtaggagagtagggcatggaggaagagactcaagatgacacataaaataaatgaatggctgaagaagactggagttaggtctcagaaaccccagcaaatgactgagttacctattaacatatcacagggggttagggttagactagctttcccagcatccctcagtacctctgcctcctcccagcccttctcatcctgcccctaccctaaacatctccttctgaggatctgggcttccattagaagtagtcacgtccttctccttttattccattttttcattcaagtggaaccctagggttacacacacacacacacacacacacacacacacacacacacacaccactgtcttcacaattaacctgtggctgctctttaatgatgaaagtgtaaacatttgggttaggattataaagtatatgactatactttatcttaatgtcttggtttttctaacctaacttttgaagtaaaattggtttcaccttttcaccaaatattctaggaatttctcaaccattagttgtgagaggcaagaagagatagatactgatgtctgaaaacttgatattggtttaagcattttgattttagctcaatattagtctcattcttactttatttcatttgtcttatttatagactaggtgtcttgtatcccaggatggctcaaactcactgtgtgaccaaggatggccctgaactactgtacttcctatctctatttctgaagtgttgggcttgcaggttaaggctaccatgcagatcatggcaggctcactatgaagccaggctgtccttgaattcaccacctccctacagtggcttctagaatgcttggattaaaattggagccaccatacccccaacaactttctctttaaaccgtcctctgattctgcagtagaaagctaaatgaagagattaaaatggttaaaatgatggctcagatgcagttttatgtcactcgtcatcatcaaatccatatgcttctcctagcctgaaagcctatacattaaccagtaaccacgaagaaaacccggaggccaaaaatcccaaaggctgtggacacattaaaaacgttatcagagcacatgttaaaagacagaggaaagttgacaagactccaaaatgacaattaaaagcaacctaacgtggtgggacaatgaataactaggtccttgtctaaagttcgcggcacttcctaaaatttctaggaaggcaggatttggatccacaccatggatggttgcacgataaataataacttgataacgcgttaatttctaagctatttcgcggacctagaaccataggcgtcacccgctggtaatcccgcctctgagcagcgacatttaaaaacatcgcggaaagacagtcccgcccacctcatctctcttcccataattccttcctcactaatttcccagaaacctgaggacctcaaacgcggcgctacacgcccagggaagtcaacccatcccctcagttattattggccagctatttttaatcccgccctagaagcgcaggctaaggcatttgattgggcatgagagtggtcgggctctgacgtcgataggggggcgtggctcaggctttgcgttccacccacgtcccgcagcaccatgtaccgcgcactccggctcctcgcccgctcgcgtcgcctcctgagggcaccgtcggccggcgctgcagtctcaggggaagcaggcgccctcccgcagcgtgtcccgaacgtcgctcgaatggtgagcgagcatctcgggctgggcctccccggggtgaccttcatgcgtgtcagcgtgtccccggtgtccccgcgggccgggccgggcctgggctcagcgcccgcacacatgctcatcttatcctccgccccgggcgccgcctccagccgggtgtgctgggactgcggccccgcggagggacgcgctcctgtggggcaggatgggcggcagggctgagctgccccaagcgtgagctcgcagaggcccttggtcttggacaagtctggggccgtgcgtgcttgggggaggatgccgggtgggtggcggggcaagaggggtgagttaggatgcaaggatacatggatgcaggaagtgcggggagggaggagggcacagggaaaggggcagccctctccttacccaggtggcaggccctgctggccagacacagagtgtcgcctaggctgggaacccctcgactctgggttcttggtccaccaacgtgcactctcgttcttccagatcctccaagtgaatgaagccggtgtgtcttttgaacggaaaggcttttcttcttacgaatttgactctttagcttgtgagagtgcacgtgccttctcttcaaaacttgtaaaactctgaaatcgatagatacggacgtaagaaggctcaatcatggctgatgagattgcataggaccaaactgtgtccgaatcaatattttgtcagaaagactgctaaggaacttacagggccaaatttaaagtatgacgtgcttcgttaagtcacttttgtgtttagagtgctttaggatgccttatacgtgaatgtgtgtggttggaaaaaggctgagaagtgaaccactctggggtttagtgtgcactttgcagtgtgaggtgatttcaaatcctgctgcggctttcaggcaggttgtctttgtgcctcagtttctacatgcaaaattgagataattacagaggctcagcaagactgaacttgggaaaacacacatgcagtaacataaatcatgaaagaaactacaaagtccaggctgccaagagttcctggaacttttctctggagattttaatgcatttaaagatattttagagaagaataaatgtgaaaacgtagcacttccttgctcttagggttgtaatgtcagaaaatggaattaagatagttttctttttccatagttccaaggacattttcccacataactctcttgtcatttccaacaataatgctaagacagcttcttcccctctcagttaccctagtctagatgatcctcacaggcaagccctcacaggcttgtcttactggtgactctagatcctgtcaggttgactgtattaatcatcacacctgaggataaaggtagaaagtagcttttgaaagagtttgttgtatgctgagatactgctgtgtttgcttttgttatacattgggtatgtttttaatgatcaagatgggatgctttgaagtgtgtgctgagattgtgattttagctacagttcacttttcagcactttaaaatgtgggtatcagaatcctaggatgtgcctccattgcttcgtctctacgtttgtgatgctgtcccatggacctacggttacctgcatgttagcagatgcttggctattcaattatccctctaagcaattaaacttgatttgaattaattttcctttttttttaagatttaaagctgaagacatgactaaaaggaatcttgcccagtattttttattccaaatattacactaaccaaacccatttagaagatacattgttgatatgtaataatgaaattttagtaattttgaacacagaaggtgatcatagaaattttaaacctgaagcttaatttcataaagcttgcagatgaaagctggtctcccttgagattcaacattttagtactatctaagaaggtgaggaagacatgaagggctggtgtggtttgctgctgttgtcatttgctgtttgttttgaagtgtattttaacataagggtgctttttaggttatctgaaacagaggttgtggtatttactgtttacttgtacatctcaccctcttgtcatttccaacaagtctgctgattttgttaaaagttgttccctagtgttgagaaatccacataaccctggatgccctgggttacctgttacttaaaagaacatcccagagttcacctgaagtgcgtcattgccttctttctgattggggatttgtaaataagatagtgcataattgcttagaatttagagactgttggcaaagattaaataagcagggggcagaggtggctgagggtcgagtccctgctgtgtgacttcaggagggaaggtttgattcatgttttaggggtgcagtattgcatgatgggattggagcaggtgcttgaggtacctgttcacactgggtgtgcactcaggaagcagtgagaggaatgctggtactcagcttgttttatctatttgaaattattttatattttattttttaaattaaaatgcaattgtgtaatgttccccttcccttgcctcgctgccaactcctcttacatacccgccctcttgtcccatctcagactcatggcctctttttctatagtggttagttagtatgtgtgtcttagttattttgctgttatgctaaaacaccgtgaccaagacaacttacagaagaaagggtttaatttggaagcagagatagcaaactcaaatggcgctagtctttaagctccctagtgacacacttcctccagcaagagcacaccttttgagcttccccaaacagggccatcatctggggaccaaacattcaaatgcccaagaatgaggggggaaattatattattatattttaactaaacctcccccagtaaagttagagatctcttaatatttcaagaatattctgctgagattattcaagtattaaatatttatcacttactcttcaatattgtataagctttatattaagatatttcacaataaatttgttgagtatttgttaaatattttttgttagtttaagttgatgcacttgatagaatcccaacttctccataaacaggagccttggtccctgttcttactctacgtgaccttcaagatgtggctcctgagtcatagaagacttgcatgcatgcgttcatgcccgtctttctagagaggctccctagcttccctcagattctgaaatgcttccattgacctagaagatgaagaagagacttagctggtttcctccctgcatattcaccaggttgacaggtgagaaaggctgacttgtaggtggagatccagctgttaagtggttgtctgccttctagtctgagccattcatgttgtcactactgtctaaggcatagtgacagtttcgctaagttttagctttacttaagtaaatttaaaaatctcaaaatgtttttatacttttcaaaagtttccagtaaaataaaatttaaatgagatcagaattggtcaaatcttgactagtgataggcacacttttttttttttttgtatttcaaagactttctgtgttaacagtaggttaactttaacagtagctttctttaatacccgaatttatgaatattgatgtcaaattttttaaagaaaactgaaaatgaggaatagaacaaccagatggaattttatgtttttatgatactttaaacatttctttttctccttacagctgatcagattttgtttgctttgatcctggatttctttccaagttaaaataatgtctcatccctgtctttaggcaagccaaaattccttccgtatagaatatgacacctttggtgaactgaaggtcccaactgataagtattatggtgcccagaccgtgagatctacaatgaattttaagattggaggcccgacggaacgtatgccagtaagtggctttgtggagatgttgacttagagctaagctgtagtcagtcacaggaatcatattattttataaatattttataaaattaaaacaaagttatgagaaaactatctaagtttctaaggaagttctctttcattaagatcccaagaaactattaaagttttagaatgctattgctttcagccaaggctttgaatactttgtatttttagctgttataattaaatattatttgctgatggtctgtgttagtcatggttctccaaaggaacagaagtgattttgtgtgtgtgtgtgtgtgtgtgtgtgtgtgcatgtgatttattagactggcccacaggctatgatctgagtagtccaacaatagctgactgactcctgatgtaaaggccaaggatctggtcccattcacagcactggatgtctcagcagtgccagtcagctgctggctcccagggaattccgggagagcagctggacttcagtctgtgctggaatcctgaagaagtaggtctagtagccatgagggaacatctccgtgttaggataggtgaactgccagtaagagtggggcaaacagacaaaaagcaaacgcttcctccttccacgagttttacatggtctcccaccagaaggtgtggtacagatttagggtaggttttctgatctcaaatgatccaccaagaaaatcctttacagtgcccagctctttaggctttaggtgattccaaatgttatcaagttgacaaccaaggcagacattttaaagttttttctttttatttatttatttatttatttatttatttattatttatttatttatttaattactttttgttgttgttctttggggggggcgagggggtaggatttcacggttggcaaacatttttatttcatttctcaaattctcttcttcttaattgtcctacttgtctttttctcctccctctctttttcctcctctctatgtagcccaggctgccctcaaacccatgattttccctcctggccttacatgggctaaggttccaggtgcacaacagccatgcccagctctttgtgggtgttctgaagtcatgctagaatgatgaagtcaggttagaatgatgaaatgattgaatactattgattttaatacatattgtgtaaaataaacccataccttacatatccatccatgtagcatagttattattggcattgtctttatatgaacacttctgtgtgtgtatgtgtgttttggttatagatttgtataaatgtatataatcatctagattctgttctgttgattcacttagataatttcctttgctttctaaacttttgagggtcatagtgttggtactatttttgcataaactaaattttcatgcttatctaaaattgcaaatttaaggtatttttctgattaattttagatcccagttattaaagcttttggcatcttgaagcgagctgctgctgaagtaaaccaggattatggtcttgatccaaagattgctagtgcaataatgaaggcagcagatgaggtaggaggtgataagagtgtttacacaatggcatcaaagtcctgaggttcactgtttgacaataagctctgcctgcaggaaggggcattttgaagtcttgggttaatgaatttcagggtacggtggcagcattattcagaggattcaatatggtgttcaaaacatcttgtgatgtcatttctcagtaatttttatatcttaagtctttttattgtttaaggggctggagagatgactcagcagttaagagcaccactgactgactgctcttccagaggtcccaggtccaattcccagcacccacatggcagtttcaggggatgcgataccctcacacagacatacatgcaggcacaacaccaatgcacataaaatacagagaaattaatgacaaaattaaaaagatggtttgaactttagggtcttatgaataagcgatttctttttaaactagttgattatctatcaactagtttatctatctagaatgtaatctccttaagcactctcttgaggaagtggtcggaggtgagttgaatgaaacattgtgtttacaatgttgccttacagtgtttatgatgatgggaaggctgggctttcatcacaacagctttgtgtgtaatttggctaccttagttatgttaccagtaatagaaattagatattaaaatttggcatagaacagagcctaagcttagaggaacattcttttttttttttattattagaaagaaaattattttacatgtcaatcccaggtccctttccctcccctcctcccctgccctagaggaacattctttaaacatctcaggatcttaattttaatgaggaaaataaagtggacagaaaatgtgtgtttccctgtgtacccctgccccagcttgggtagtagaatccacaaatgctcaagttccttttgtaaaacatgtgataaagcctgggcactccctgtcatgtgttttgtttctcacttactcgaaatagcaagactgtaaatattgtggaagagttgttaactctgttcctgtcagtgaggtacacatgcttagtacaaccgcagtgtttaaaaggtttctaaagaatgtttttaccttatagttgtatagaatgttttatcttatagttgaatctgtgaaggtggagcccacagttactgagggccttcatgaacacacaccattgcaggggagagggaagtgatggagttacactttcctttgttctcagagttctctaggcagatgactggtggcgttcatatacctggaaaaggagccagttaatcaggttaatggccctctcaaatacattctgatcttctgtgtcattttatagtgaagttaaatattcattattttaggaagcctacagtttaaaagctttcaagtaagttaagaattaaaaaatctcacagggcagtgagatggcttagtgggtaaaggctcctgctacacaagttcaaagacctgtttgatttccagaatccatgtaaaggtggaaggagagccttaactccacaaagttgtccgacttccacacaaacacactgtggcatacctgcacacagaaaaataaattataagtttcaaagagaaatctggcagaaattggggcaattatgggcaggccttttcatttggcagttgctgctcattgaacatttgtactgtgaggtagctcttagtaaactcacattaccaagccctggttcattatcacgctggctgtggcagtaacatctgttggatgtgcctgctgagtaccagtaattaatatatctgaagacatcatactagcagcttcacaggtggtcctccagtgcagcaggcagcacagggaaacaagaaaatggctttcattcagtttctatccgaagccagtgagttgtcatcattcagaatatatatagtttggtgtttcaaagtgactgtaattagaaaaagtgatgccacagatatttaggattgtgccatggctgcctttaactgtcttgaaatcattagcaagccattaaacatatgaaacaactgtcatcttttaattagtttgaatgcagagctttactcttccatggttattttaaacagctaaacaaatacccagtattccttattttaaaaagacttaatattttctttcctgcaggtagctgaaggtaaactaaacgatcactttcctctggtggtgtggcagactggatcaggaacccagacaaacatgaatgtaaatgaagtcattagcaacagagcaattgaaatgttaggaggtgaacttggcagcaagaagcctgtgcaccccaacgaccatgtgaataagagccaggtgggtgcatgctctcagctccatccagatagattgacaagcgtatgggagatgtgcttgtaactcaggcatgtgcattttgacaaggagagattgtgttctttactagagaagacttttaagtttgttttttccaggaatcgtgactggtttcaaacttcctacaacaatcactgttaggacatcttggtttagtatatgtatacattttattgttccatttatttagaacttttttttttttttttttttttttgagacagactttctttgtgtaacagtcctggctgtcctggaactcactctgtagaccaggctggccttgagcttactgagatccacctgcctttgcttcccaagtgctggattaaaggtatgagccaccactgcccagctagaacattttttatttaaaaatagatttgtaaaaatattttattcatttaccaccttcccgtaatgctaatgtctcttatatctggcttcagtttctggaactaagaagttgctcttggcacagtactcttatacaggcttttttcaagatttccccaattttctaccaagttttcactttgtggttttgggtttcccaagggaggacaggttgtggatatataatctgtaacagtagcagttacacttggtatgtaggcagaggctatgagttcttagggggactctccccagaagtgagagacccttcacactacaacctgtcgagtatttggtggcagcctgacttgccatggtgatgttatgttttatcactggttgtaaggtgatgctactagttgtcaccaccattacatcatgtttgtttccatgtcatatttgtcattatttgtcctcattcctggtgttacactggagcatcccttcagaggagaagtagaggagatttgtggatatgtgttatatccccacagaagttatcagagatattgtagttgtggtaccaatctgtaggagcccgtgtttgtttgtgccccactatgaggggccatctgtatgaacccgtctttgggggactacagtcagatctagccaatttgcccggctcatacctgagagggggagtgtggattgagaaacagcaggtaaagatactatggaaaacatagagacacagaatagagtcaggagggcaatccagtgaatactgaacataccagattttttcgtcaacattcttatataccccaaccaaaaagggggaaatgacaaaagacttctttatcatgatacaaggaacaaacagattttcttccttaattctccaaacatttagtaagcatgccttagactaaatctcttgttatttagataagacatccactctttagaccaaatgtcctacagtagctatgccttagacctttaggtcttatgactttaaccttggaaaagtaaggatagatttgaactctctgatcttaagccaagatgaagctaagccatttttatggaccctgacaagataccttgagactgtgaaaataacctccccttaacaaggagacagcattgtcagtgactcttacccattgccatatttctgtggtagtttcttgttttgttttatggtggtttttttagttgtctgcagtgctggggatggaatccaaggcctcagcatgccaggcagctgttctaccactgagcccacgtgtggtgtcttagtaatgatttccagttttccttctttttgcattgattaatgggaatttttctgtaaagaaggtttgttctcccatttttttgtttattcagtcaaatgtagcactaaaatcacagtggctttccattccttcagttataaccctatattttgttatttatattattaagattgggtttgggggcatgccaccatcttttttctctgaatccacacccttatgttttgtcatggaaagatatctaagaccactgtgagatatccaagcccgttatcatgtattttccctgctcagctgtggaacagtctttatttatttatttattttttttttatttaaaatggaacttaggtgctggtctagtattttcaagtatcagaaacaaagctttagctaggttgtggtgcatttctttaatcccagtctggtgaggcagaggcaggtggatctcttgcattcgagtccagcctggtctacagactgagttctaggacattcaggattacttagaaaaaccctatcttaaaaaacaaaaaaaagctggatggtagtggtgctccagcactcgggaggcagaggcaggcagatctctgtgagtttgaggccagccttgtccacagactatgttccaggacagccagggttacacaaagaaactctgtctcaaaccttgccgccccccctccccccaggcaaagtttttatatagttcatttataaagtacttttaatattcagtattgcctttcagtgtggtttattaaacataatttgtagtctgaagtctgcttcagaatgatgtagtaggataaagaaacaggtgtcacaagactaaatgcacattgctgaatttctgcttagctttaggtgcatgagtggtcattgtagtgttcactgaactgtgtaagtactgtaaaagtacaaggacagctgtgtgctgagtgtgcacacctggctatcagctttataagttcgaaatatttttcaggtcatgttatctgcttgacaggttgacttatttttttggctttctgcctcacagaatttttctcatgattactaaataaatgttttttttttttaataaaagaatggctgcattctaggacacattactatcttcaaatgtgcttgttagctcctatgtctactgtcctttattagggagtacttgtaatatatagtgggtttagtgtacttaagttataatatatattatgcccagtgcacttatatatgagacagtcctgaatatgtaccttataggaagccaggttgttttttatttcaccagctgacctattacttaccatatcaacactattgtgtatgctgggttttgaataggcacctagttggtttattttgaggtcttctttccttacctctgagttaatatcttgtttcttttgaaaattccccacagagctcgaatgacacctttcccacagcaatgcacatcgccgctgcggtggaagttcatgaggtcttgttaccaggactacagaagttgcatgatgcactcagtgcaaaatccaaagagtttgcacaggtcatcaaaattgggcgaacccacacgcaggacgctgtcccacttactcttgggcaggtacaagagtttgactcattttgttcagtttagggattgatacaaattgtctatgttttccctcaaaattaaaaggccaactttttaacaacaaagatcagggttgatcttctgaattaaccagtcagcaacttttaatattgtccccatgagatgagagcatgctggcagtgaactggactcagctgaactactgggttcaagttttgctctgctgtagaccagttacatgactgtaggacagttatttagcttctctgtgcctcagtttccggggtaataaagtaaagagaatgcatagttgtgaggctgtagtgattgattgacggaagagtgtttagaaccgtcttgggtacatagccatcatcatcatcgtcactgcatggtcatgattgtgtcatttgtctcaccctaaatcaagaggttatttaattaaagcagatttttaaaagtaattaagggaggctggtgttaccctttacaatgattttgactgcattggaagagatactacttttcgggagaccagaaagtacttttatgtttctgtaccagtagctgaagggagatctaataatgtgcattgcaaagaaacaagagggaattcttgacagtgtagtgatatttatgatttattaaactttgactgagtattcagaaaagcaaagtcagccacaagccatagaagccaggcacacacttttaattccagcagcctgaagtaggaggagtcactcactacacttagttctttacataatttctaaggaggagcaatatatgcaattcagtttctaagttttactttcttttcttttggtatgttgtatgttgaaagccacaatgccaaaattcagttagtcttctgtaggaaatcatcacactattcatcatgacaggaattctattttttttttttttttttttttttttttttactttatgagaacatgtatacttgttttgattggaattgtcttttgagtttttgcaattttcaaaatctatgctctaactgtatactgttgatatgtatgtgtcacatgggggtaaggggagagaaggggagacgggagataaacaagaaaaagttaatgtttcatgaattatatctacctttgaagtgttttgtttagaatgtaatctcctgtcttaattaggagttctattgctgtgaagaaacatggcagctccaataaaggaaaacattgaatagggtggcttacagtttcagaggtttcgtccattatcctcatggtgggacatggtgatatgcaggcagacatggtgcttgagcaggagctgagagtggagaaggagccacatcttgatcctaaggcaactgatctgaaacactggacataacttgagcatatgagacctcaaagcccgcctccacagtgacacacttcctccaacaaggccacacttattctaaagccatacctcttaatagtgccactccctatgagcttatgggggccagttacattcaaactaccacaaaccccactaaaaatattcagtttttcagtactttcaggtgggagaaaagatttagcttatctgtatatcttaatttacacagataagccccattataaaatacaaagggtataacatttgtgtgttttttttttttttttttttttttttttttttttttggcttcttcaagacagggtttctctatgtggctatggagcttttcctggcactcactctgtagaccaagctggcctcgaattcacagagatctgcctgcctctgcctcctgagtgctgggattaaaggcgtgcaccaccactgctcagcaggcataaagtttttatctctgcataattattaatattcacaatgctcaaaacatgacagattgaggttgctttaaagtgttgtagtgtggaaagcagcgtgacatggaagcagaatgacagtgaacagtggagccatgaacctgtgcccttatggcctcctcaggccgctgaaggagttgtttcactctcagagccctgtgaaggaggtgcttgggttccctctcaggtctttcagctgaaattgtatagaaaacatttccattttcttttttctttggggaatattcagattgggaaggggatcagtttattgggtggatagcaggtagagccgttgtttaatgtagtggaactgttcttttttaagtttatttcatgagctgttttcttgactattaaaacgttaagttataaacaaactaaactgcatgtttttgacttacattgtcctgccttgtagatttgtatcccttcctcctgtctcttaattcatcatgtgaatgaattaacactgagtagcatataatttaatattctgaagtgtattctaaaagctcctattttaatgccatcctagtaagtggtatactgttaggaagtttgttcttactgtgaattttcttttgcaggaattcagtggttatgttcagcaagttcattatgcaatggcgagaataaaagccgccatgccaagaatctatgagctcgctgctggaggcactgctgtcgggacaggtttaaacaccagaatcggctttgcagaaaaggtggctgccaaagtggctgcactcacaggttgggactgcatgcattactgctcattttcttcatgccagcttatacattgtctagatgtttctaggcttaaaaaaatttaggagtaacatgttcccattaaacatgtgtccatttttgaaattaatcaagttcgttgtaatttataagacttccatgtaagagtttttaggcatgcaattataatttatgtgatagctttgcttgctgtctggtagaagtcattcctttcctttcaaagggttttaagtacagttttcaaagaaagtagaaacagttgactgttgagaaacctaccaaatgataactgtgctgtaagcttagtattttgtatgttacactgtgatatttcttagccttaacatctttaaagtgttgtcttcgctcttgtacagtactataatctgaataataattactgttatagttagagccagcttgtcatgtctagaaaaataattaagatacagatattaccagaaggttagggcagtgataactatataatatgtaccacagtctagtaggtgagtttttaaaatattcatttattttttatttacttatttacttatttattctgtcacctatccatctatttattatttgttttttgctttttgtttgtttgtttttttttttgagactgggtttttctgtgtaatagttctgactgtcctggaatttgctttgtagaccaggctggcctcagactcacagagatctatatccctgcctctgcctctgcctcctgagtgctgggattaaaggcgtgtaaatttttaaagtttcataaatgtatacaatgcatcttgaccatatttagctcccatctcccagccctctccagatatgtctcccttccaacttcaagttcctaccttctctctctctcagcatctgtccccaagttcaatttctgcttccctcatatacatgggtatggggttatccactaggttttggcagcctactagtagctattccccaaagaaaaggaaccctccttcctccagcagccagtatctggagtatctcctcaggtgggggtgggattcatgcaggaacttttaactggcttgactttgtgagatacccatagctggtgttgctcacgtattcaggatccttgttgtgtccaaaggacagcatttcacagcacttctccccatctcccagctctccattcttcctgccttttcttctgggatgtctttgaaccttggcttggggtgatagagaagtgccttctgtggctgagcacatggtcgcttatcctctagctgagttgttttaaaaatcacgtttgaatagaaaggaactgtgttacacagttacacagacttcagaatctttgtttgtggaatggaagcactgagaccacagcttatctgtgttcctattttctcaagtagaacagactggagtagacagagattttttttaagatttattttatgtatatatgacgactctgtctgcatgcacaccgttacaccagaagaggccatcagatcccactagagatggttgtgaaccactgtggttgctgagaattgagctcaggtcctctggaagagcagcctgtgctcttaactgatctctccagcccgtagacagagattttaagcaataagatcagagagtgaatttcacagttctcatccttacttgagtgtagtttggccttcttcgaagtgcttgtttaaagagtcatgttaagccctttgggatgtcttaaagcagtgttgacacagcttgactcttaagcattttcctcaagtgaagatttgcatttttcatttattattggtttctagatggttatagtagtgaaactcaagctcggccaacaccatgcacatgctaggcaagcactgtcactgaactgtgcacacagccctccgttctaattcgctttgtgaacactgaactttgtttaacttacttaggttgatggcatgtttactcttccctgcttaccctcagaaccctttccttcctgcaggcttgccttttgtcactgccccaaataagtttgaagctctggccgctcacgatgccctggtggagcttagtggagccatgaacaccactgcctgcagcctgatgaagatagcaaatgatatccgcttcctgggttctggtcctcggtcaggtttaggagagctgatcttgcctgaaaatgaaccaggaagcagcatcatgccaggtaagcacacagctgattctggagctggaattgactagatcccagggacccgtaaccacagaacatgccttttcatttactgccatccctgaagtgatggggacaggtggggagcacttgtttcatggtgtccatgtggatcattgcagaacttttgggagtgtcacttaccaagtcaggaaaatgacatgagttagtatcatgttgaggttttcatactggaaccttcgtgatagttgtaagagaatggcagggtaaaacaattagcctaggttgaataaatatgagcccccctactaaagtccttgtgtcatgatttgcctcagattaaaaggaagtgacagtcactagagtgtgggacgtgaacatagttgggcaaaccgacatttaagggagtgactaatgagttgcctttctttggagaaatgtcttgatactgggctttactcatttggcattttactggtgacttgggatagagacgaggaacacttgctaatcatttagtcaatagcaaaggttgaggtggcagtaggttgtagaacagagtcaagattcacaaagactctctggagaccagttgagctgtactaaaatggacaaagtgactttcaacagtttactctatagaaaatgctttcactagacttttttttctttatgttttttttttttttggagcctatcctggcactcgctctggagaccaggctggcctcgaactcacagagatctgcttgcctctgcctcccgagtgctgggattaaaggcatgcgtcaccaatgcccggcctagacttttaactatatatgtgtacatagaccaaaagatctctatttgcagtagtctgtgttgaaaatgacatgtagatttggttggttgcaaatttaaataattgtttgaaggagaaacggagccaggtgtggtaatgcatggggttaatcctggcactaaggaggctgaggcaggaaggttatgagttcaaggccaacctgggctacaaacagtattttcaggcctgactgggcaactaaagccaaaacctgtttccataataaaaagcaaatagaagcgcatgtgttctctcacgcgggatagaagggtctaagtgtgcatcttgggcttgggcttataaaggagggttgctgagctagagccctggcatctcccccagagaagcctgcccttatttattagctttgctaactcttttcttggctgtcaccctcttggagggtggagtctatgtctttttaattgtatatttcatgcctggttgcataaatgtctccataggaggaaaaaaagccataaagatggaaaaccatatgtaggtgcagcttatcattagttctcattgagtgattttctgtgactttgcttccctgtttctttgatatttttgtatgtgtgtgatattgggggttaaacctaaagctccctcatgttaagcaagattctgtccttaagatgtatccctaaaattgtttgtatgttttgagtcaagatctcactaagttgcctagtctggccttgcctcaggtagtccttgaacttggaatcttcctgccttagcctcctgagtgactagaatttcagtctgtgtctcaactttgttcctttttatgtctttatttaataatgttacatttctttctttggtataaaaaacagttgtaagtgatatgggaaaccatgagcctatttgatgagattctgcactggttttctcaaaggaaaggtgaaccctactcaatgtgaagcaatgacgatggttgcagcccaagttatggggaatcatgttgctgttactgttggaggcagcaatggacattttgagttgaacgtttttaaaccaatgatggtaagctttcaatttgctgtttagcaactttttattgaagactaattgccagtgctcttgtctttcctgaaggtttctgaagcgtccacattaggtagttgtgtggtgtctgtagcaactggaagtcaagtgtaccaaattgttactgggataacttgagatactaggattggatctcactcagttcaagtgatctgatagctttcttttttaagtagaagaaagaaatctggaagtaagatgggttttttgtctcctcccactatgggtgccaagagttaacagtcagtttaggtctgctcagtttaaaaagacgccttccttacagccgtccctgctcagactgctgctatgtgccttcttccttcagatgtggatggcaaagactgacacgttgtctcgttcttttatggtttgatcactgtggtccagcctcagccctttcacactgcttgcattgttctccatcgtcagtgaccttttccttccagcggacatgttgactgtctctccattccttcaggactttctctgtcctcaacaaggctttctttaatttccttctgcctttttcatgtaccttagaaactgtccaccaaacttctcctttttcctacatcattccaaatatggaacaacctgtgtcaacctgtgtgcccgtacctgagcttcagacagccaagctgtgtcacctttaagtccttcatttatacagtgctgaatatgaaatacactagagactatatcttactggtttgtggtgtaaaatctaattgataagaatatgcaaatagcttagtacattgattgaagtttcactttggatcacagaattttagttgttcacaataaaacaatcaacataatgagggttttggtttttgcccttacgacatgcatattctgttgggattggtaaataaaagactggccaaagtgacctttagatctatgtactgtatacccaacagttaatactagctgcctgacatatatagaagtgtaacaactgtttattgttagattttaaatcattattatgtcttaaaagtaatgccgtcttattcctttgtaaaaatcaagggaagaaaacagtttggtagagagtctttccatctcatagagtaaaaactactatgtgagcctgagagacagggaaaacattggggtgaggggtagacctaattgaggaaaaaaaagtttgacttcaattagaaaatcaaggtgatatttaatttataattaagtcattggaatcaaattaacctttaatgtctagcttctgttagtccattggtggaagtatagctttagacagaggtatgtatatatgggaagtttgctcaagaaacaggtgttaagtaccaattggatttatatgatcttaaactgtgggtgatgttactttaaaatgatcctggaatgtttgttccattaggcataaaatcagagaacccccctccccccctccaaaaaaaaaaaaaaaaaacagagcaacatttagcaactatcccaggcctttacgcctctgcacatccttccccttcgtggatgagtgttcatccagctctggatgtccacttctgtgttttgtaggactcctcctggattgtggatacaacacctcacctgttttgcatgttcactgtgggttgtcttgtgttagtttccaccatggactgtcttttattagttactcactttgggctgtcttgaattagttacccaccatgggctgtcttgcattagttatcagttattggttcccttgtgttagttgtttgatgtgggctcttgtgttagttatacattgtgggctgtcttgcattagttattctcctgttgtccatcatgaactatcctgtgttagtcactcactgtgggctattttgtgttggttattcaccatagacttttctatcatttttagatttgcaactttgtgttttcagcgccttcctttctcacttgtcttcttgggtatatactgcaggatttgcaggagggatacatggttatgggatcacatatccaacatggaacatcaaataatgcatgttattgcacaaaagcaaaccaaagtaaactggggcttagaaatgattctctttccgtcttcctctgtgtttctctggcagattaagaatgtgttacactcagccaggctgctgggggatgcttcagtgtccttcacagaaaactgtgtggtggggatccaggccaacacagagaggatcaacaagctaatgaatgagtctttaatgttggtgacagctcttaatccccatataggtaagtttggaggataatgccattttgaaaacagcatttaaaagtgaaattaaaaaaaaaaaaccttaaattaaaaaaaaaatttgtgtgtgtgtgtgtgtgtgtgtgtgtgtgtgtgtgtgtgtgtgtgtatgtgtgtatgtgtatgtgtgtgtacatacatatatggcatggtgtatatgtgtgtgtcatgttttctctttgtattatgctggtcccagttagaagtcttgtcaacaaacacctttatctgccgaaccattttgttggtctccaaaatttcaagtgacttgtttttttgaacagggtttcaggtatatatatagctttggatgactttgaactcttatttaaaaaattaaattaaaaaaagaaaaacttttacatttctgtgtgtgtgtgtgtgtgtgtgtgtgtgtgtctgtctgtctgtctgtctgtctgtctgtctgtctgtccatctgtgccatgggatacacgtaggggtcagtgaaaggcttgcaggagtcagttttctccttccatcatgtgcatctgtgggatagaactcagaggctgccttgaaacactaaggtctcacagtagcccttatttcatgttaatggactcagatgctgggtgctgcatgcagttggagagggttatctgggagaccctctgctggtaatgtcactaggtggcactgcctgattaccaatggtgaatggactcatttggtttttccttttctaggtactatgtaattcttggattttgttttgtccaattcagatatggaacgttactaattaagagaaaggctaaatactgaatgctttttctgaaattatcctttgtgttcctcgtcttttccagattgtaattgctttttttttttatacagacttagattgcaggctgggcaccaccacccagcccataaggcatttgctctggtttcttcaggttgaggcagtcactgtgttacattccctcggctgagcagatgactttggactgtttttaaatgagtgatggtgccgttatgtggcatgatagagtttccactttagaatgttctataatcctgagcttttggagcagcttttatgcatgggtttctacttttataaagctgtttaaatgttttgactgatttaaaattgttacacaccagtattcacctggaagggtgcagagcaaccccaaaggctcacgtgacaaacactccatcggacacttgtaggttagagacactgtctaagcagaattactgggaagcttccttggacagatccatcaaggcaacatctctggcaagtgtgcctcatgagtgaggcctggtcatgggctctctcagtggtcccgtgatacaagaagctggtggctgatggtgttttgtgtttgtgagcagggatgcttatgctttcgtcctcgttcacataaaaagtacctaagacagctggacccaagaatttagtgtgaacatctggttactccatgccagctcagtgaacgttcatagattcagctaagaatgaagtcatgcaagcccattttggttacatccagacatgtaccactttaccacctggttatcttattgccccagcaggctccacccctttggtcatagttcttgaacttttaagtttcatttttgtattctctcattgcttttgccttctttctttttaaaactatcaatttttaaggtcaaaacaacattgagaacttcccagtgttagtcttcatttaaaaagcagatgactctgaagtaaaccaatgcctatgatgtttccttttgttttgtttttgagacaggcttgttgagtagcccaggctgagactcacggtcatctcctggatgctagtatttcagtgcattgggttgcctgggttcctttttccaaatacatatctctactaaaactttccctttttatccttgtaatatctaagcagacgccagggaatggtaccctgttcctgcctcaacaaggactgccagctctccctccataggcagtttcagtggctgcctgttaaacatctgtctgctctgcaagcctgccacagttaaatgttagtgctgccttagaaagataattagggccagatatggtggcacacgtctttaatcccagcactcagaagatagggacaggcaatctctgattttgagcccggcctggttacaaagccaattccaggatagccacagctgcacagagaaatcctgtctgggggttggggagagtaactgtgggacaacaaacccaaatgtgaatttttataccatggtactttattttcaattttttatgctctcttttcattattggtccacttcaacataggaacaagtcttgcataaaatgaggtatgcttaagtctatttcctagggtaatcaaggtcagattctatagaagacatgacagtgattggctttagttttaaaatagaatgtgtcatttcagagagccgtaacatcagtatcagtaaacagtgtggttgcctgttgttttagaaaatttcactactaatgtgtgtgttgtgtgtcttctctgcagggtatgacaaagcagcgaagattgccaagacagcacacaagaaaggatcaaccttaaaggaaacggctattgaacttggctatctcactgcagagcagtttgatgagtgggtgaagcccaaggatatgctgggtccaaagtgacttaaataaatttatattaaaataaacttgtatgaaatttaaaaaacaaggctctgcttttagataaaaatgagaactcaaaaaaggaaactctgtggacttgaactgaccatttgcatgatgctccagggccacagtaaactaaataagtgcaaaatgatttcttaaaataaagaagaaaacaaaataatttttattttatgctaaataacagataatcaaagctctgatatctgtgcatatgtgttggtcacttcatgaactttttaaaagcgccccatcagtttttaaggttttggtttatggctggtagtattttaatgaagttccctgagagtaaaaagtacttgttattgattcacaaatcatgtctccaaccagcttgaattttcctgggctctcagagcttaagctggccaaacccttttgtgtaaggatatgtatatgtatatgtgtagtgtgtgtgtgtgtgtgtgtgtgtgtgtgtgtgtgtgtgtgtgtgtgtgtgtgtgttagtgtcaggaaataggatcaattgaaacctgggacatatacatgctatagtacagatagttataaagactggtatgtttgggccaagaatcctttaatatttgttgttgggaaagtaattataccaccaattcttccgtgtcagtttaaagtcattgtctatatagaagcaaaaagtaactaaaactactagaaatgttatggaagatgaatttttattatttacttctctggtggtgctggaggtggaatccaggtcctcacacatgctgggcactccactgttgagttctagccctagtcttctttttacgtttttcacacttgccctcatgaagttacccagtttccttgaactgtctgtgtagtcctggcaggtgttgtccttgcaaacctcctttcttggcctcctactctaggattataggacagacctcagcttgctgaattctaatttgttaacgcttgaatggacattacatgttttctttatttttatgtgtctgggtgttttccctgcatgtatgtctgtgcatcgtgtgcatgcttcctgccctagaggccagaagaggccagattctctgggactggagttactgatgttgtgagccaccgtgtagtgctgggaaattgagcccaggttgtctgcaaaagcagccagtgctttttatttttccaactttaggcagttttagtataaagagcttcagattttttcttatataactcccaaaaagtaaggatgtacttacttgtttgtgtgtgtgtgtgtgtgcgcgtgcatgcgcacgtgctctgtgttctttcttaatgtgggggattgaccctgggacatcaagcatgctaggcaggctttaccgctgagatactttcttacctatagtgctatctttgcctgtgatagtaagatgttgatactataatacttgtacagcttgcttctaagaagggttttgaaattaataaaaatcaattacattgtatagcaacaacaaacaaacttgcaaataactggtagttgtgacaattgatctttagttgtgacatccgtatttgcttggatgttgatgtctaccttggcaggctgtcacttgagggcttgtctagagacaactatttaggtaatatagataatagcacatcaggttcccagcttctcaaatagcatttgtatgactgactcagcccagcgtatgacaggccaaagaatcctttgaattgacaatcatttctgatggtgctgaagcaaaatagtacaggatgatgtcatgggaagaaggcttagaattctctgttggatccttgaattgaaggttaacttcatgtttccactgggaaacttgtctgctggaggcatctagcaaagtctacacagacatttaggtgtcacagctgtggaaggaattttaactcgttgaagccaaagagattgccaaacacaatgcacaggagagccccctccaagggcattttccagccctacgaccattcagctaggtttcacttccctgctccactccatggtgctaataggaaagattctcttcccagtaaagataggcaggtggggagtggtggctcctgccttcaatcacagcaagactgtcagatgtatgaggaattttgggttaagaggctatagaaaggaaatctttgtgttgctgggacaatggatgctggttagccagaactgaagagtcagctgtgattagtaagaggccagcatcacggaggagaagtctcctggggaatatttcctgagtcagcagaaagtagttgtactcctgaggggccctaggccacaactcagtctggcagctaaatttggaaaataaggaataaaagtcccccacatagtattggtttgggtgttacataagcaggattttaaggtccattgaaagaaactgaggcttggcaccatgtggcaggagtaaactccagcagagaagcctggaagacattggtgagggtgcaggctcagttgccgtggagaacccagcatattggagatgccaggaccatgggatgaccaacaaggacagtggcaggtgtcaagtggagtcagcctgtgcctatcagacaagctgtatatactttgaatgacagaactaaagaggtgtctacacaaaccctttggagacaaggagatctccagtgggttccatatattcatttgttaaatggacacttaggcaggttacaattttttagttatcgtgaatagtataatgataaacatgcctatgaaatatctctgtggtatattgatatgttgattccaagtcctttgggtatataaccaggaaaggtatggctagatcacatggtaggattttgtgtatttgggttttttttgttttgttttgttttgttttttctgaggatgctccacactgacttccatagtgaatgcgccaatttctaccaatgtgtaagcattcctctttgtccacatccttgctggaatttgttgtcatttgttttctggattatatctattctgactgaggtgaggtggaatctcacagcagattgatttctttcatgtttctctgtcacgtgtgtgtgtgtgtgtgtgtgtgtgtgtgtgtgtgtgtgtgtgtgtgtgtgtgtgtgtgtgcatacatatgcccacatactatgtggaatagaggacaactcacaaaagtcaattctctctttctatcatctggatcctgggattgaactcagagtctcgagttcattgagttcattgagccttggcagcaagcacctttgtctactgaacttcacttgtgctaaaagtagttttacttttaattttcctcatagggtgttgaatatttttcaaatattgcacgactgtgtttcttctattgagaactatttattctgtttactagcccattagcgcatttattgactaaatgatttaagatactttgtgtttaatttgtggagttcttacatattctagatattaatgtcctgtttaatgtacaatcagcaaataattatcccttcttgtagcttgtctctttatgttggtgattgtttcattttaatttcgttagtcccattggttaattcttgaggtgatttcttatcctattgaagtcatttttagaaaggtttttattgtgcctgtgtcttgaaatacttacctatgtcatcctctcccagtttcaaattttcatgtcttacactgatgtctttgagctgactccaggtcaatggaatgagtccagttttactcttctacatgtgggtatgaagatttcccagcatcattggttaaagaggctgtctcttccccagtttatgtttttgacacgtgatggttaacatgatagtacagtgtggaatcacttagaagtaactcatacttgtgaaggagtttctagcttggctgatgggggtgggagtttgggtcacaacaatgagaaaagtaactaatatggggatatttgtgggaggaaaacaagggcaactgactgatgtggggaaatgcagcataaatgatctgtagaagcgaaagcaaactgaggctctccacaggacaggtgatgacaaactgaggctctccacaggacaggtgatgacaaactgaggctctccacaggacaggtgatgacaaactgaggctctccacaggacaggtgatgacaaactgaggctctccacaggacaggtgatgacaaactgaggctctccacaggacaggtgatgacaaactgaggctctccacaggaccggcgatgacaaactgaggctctccacaggacaggcgatgacaaaatggcagcatcagcttgctctaagaggacactgttggattctctgatgtcgttttgtgcaagtcccagtgaagggctggcacattcaactggtttgagctgcctctgtgttcctagaaacaacgtacataaccattactattacagtttgtatctgaactacccatcggactcatgtcttgatccccagttggtagtgctgctttgagagtctgtggaacctttaggaagcaggccagactagcagaattgggtcactagacagaacactgaagattagacctgacccctggatcgtgccttactctctctgcttcctggactgttggggcaggaagcattctactctaccaccatgctttcccaacataagctaaacctctgagaccatgaggtaaaatgagttatcctccttctaagtcgttccattgggtatcttgtgatcaggatgtgatggtaactaatataattagtgttctttagaggtgttatctatagcaaatctaatgggggcacatgctagcacatgctctctaaagtcaaagcaaataaccatgggcagtggaagggaggcagtcttctcaggatcatttcatccacaggacagctgaacttttgctggtacttatcatcattcctaattaacatgcgtggtatttaccagctgccttgtggcttgaagctgatgccattttgtaagccttggggcccatgccaatgctgttttctgggacggcaccctctgttgtctttaaataaatgttatttcctttattcttgactagatccatttctggcttacagtcacgaaggttagaacacagtaacgggatatccttttattacatatatccatgtgtggcattttgcttcctggcagttactttagaaaaggaatacatatattagacaggaaagccagagtggaaaaccaaggtgttgtgtctcagttactttgggttagatcatggttctttttggtttcttgcttttgtttccttttttaacatgaaacttttgacaaaagacttcctgtgagctagcttcatccagttcagttttcccagccatgacactagctagcatgctggagtttacctcactgaccactagctatttttatcataatttatttttaaaacctctatcttcacctattttaggcttacagcaaagttaagaggctgggatgaaaggctcctctgtgccctcatccagcttctctcatgctagcattttatgtaaccctagtacaatagtcaaggctgggaaatgaacctcagtacagtagcgttagctaaactgcagacttttgctcgaacttcaccagtttttccccagttgtacttctctcttcttggattctacccaggaccccctgcactgcattctgctgtaaattgtcctttgtctcttccagtctgtcacaacctctcaaccccttgtttttgatgcttatttagagggtggatccttcattttatagaatctcctccattctgagaagtcctgtaaattctgaccatactggtttcagtcttggctgtgttgctttgagtgtggtgccacacccctgtattaccatcatcactcacaaagccttagaaaagagaatttcatgttagaagccaggctgtcctacaatgtgagacctcgttttaaaagcaacagcaatacaacaaccaaaaggaataccatagaaaaagtgctaccatgtcctgttgtgtctcatgggtggtattgatatttaatcaagagggtactagtcacatttccatactgagaagttactttttatttcttgcagtgagcaagcatgttgggactacatgttgaaactacaactgttctcctcaagcctttactcatgattttcatccatcagtgaaccttgtctacagcttttgtgtcagctgtttgttaataattccatgtctctcactttctgtttacaatttgttacgtggaattctactctgaggaagagttgtttcctttcccatggactgtgtcctactttgctttcctatggctgtgatgaacaccatggccagaagcaacttgaggaagacagggctcattttagcttacaggttatagtccatcatcaaaggaggccagggaaagagatcaaggcaggaagctggaggatggtactgcccacagtggcctggtcccttctacatcaattgccaaccaagaaaatgccagtgtagcctcatgtgatgcttttgtgctacatcaactctcggtttcctgattctaaggaatgattgtcaaagaaggcaagctggagggctgaggatcttgtcaacaagctgacctcagaggaaggggaatgatgaatgtcactgtaccttaggagaaagtcagacaggaaaagactgactagaggcaaactcttgtgctatgctgacctttgtggagaggatatacgggaccttaaagaactgaggagttaaaggacgtgtagggtactagctagatgattctagccagtgtgctttatgcagtaacagtgatgcagtcttagcatgagattattgcaacaatagtatctgaaagcctccattctgtctctagtcttctcacccataatgcttgtgctaagacactgaagatgaggcacacaccctgataatctacctgtggcctgtcgaagggggctggttgagacactgagatggccctaatggtagagtgaagagtgctacactgggtgtacaaacttacatccatcaacagagctatttgcttgtcctgtgaccactgggagaaggctgacctttgtaaagctagctttatcgttccttgctaaatggcaacagaacccatgtacttattgtttgttcaggaataagtctcagaagagaattttgtaatgcaaaattgtctacagttcgtaagatgacagaacagatgcacctctcttctgtatagaatgagttcacagacagccaatctagtgtgctgggcttgatgatttacattacagtgctcaggagacagataaccatgagccaggcataggatctctcactatagtcccagcacttgcaaggctgaggctggaggatcaccatgaacttgaggccaacctgactacagagtggggctacagtatgagacctgtctcaaacaaaacagagcagaggagaaacaaaacgactctccctatgcaaactccaagcatagatacaatagtacactgtctacctttgtgtgtactcagtgcctgattcaatgcctgacacacacaggtgcaatatgaagatgttactggaacaatcttttgagccgcttttcaaggaagaggttaagtatttgtcttagttaacattctactactataacaaagtgcgtgagatggctagcttactaaaacaaaaggttattttggctcacagtgtttgttttgggcttttgttagcttgtcaaggtggaagtgtttggtgaaataaaaccatatgactcatggccaggaataaaagtagaggaggataaaggggaggagttggggtaaatgtgaccaaaatacattgtatgaaaatcaaagaactagcatatttataaaaaacactttgtaagaaatagcagaggagaaaagagcccatcatctacaaccctcttcaaggccatctccctaatactctgaggaattttctgaaggcctacctcctaaagccccccccccccccaacagtgcacttgagattggtcctttaacacacagacctttggaggacattttccactcaaagcagagcagtagctctaccacaacaaaaagtaaaaatgtacaaaccctgataaagcaaggagtatctgtttaatggccagtgtcttgacttatactagtaattacattagctgcacaattagcagtgtcctaggagaactggacacagttggatggcagaaggtcaaggtcataagatgttgtcaaagcaagaagtatggctatgatattggggtagatggtggctgagcaactagcagggaatcagaggaggctcattataggaagagcatcccaatccaggagagagctcatgagaagcatcagttagtgcagatatggactaatttctactcagtgtagatattctctgtccaacttggagtaagatattgtggaattcattgcatcctggaaacattgttttaagggcatagtagaaagggatagcccctcatatttattttgtggggtctaccaaacatttacctcaggaggctagatctcagaaatctagcatgcacacaaaaaacatgggaaaaggaggcagaggggagggagctagaggaaagtggctaagagaaacgtgaaccattttgaagaagagatgcagggaaagaaatataaagtgggggagagtgagcaggggcctgcatggtggtctctgctattcatccggcttgcctgcactgctcagaacccggcgcttcctcagaagaggcccaagtcctcagatgaccctgcccccagatagcccttaactttcttcttctctcacaaatattaagtaaaaccacccttgaaagctattcatctgcttctcaaatgttcccacagtttttacaatctgaatggcattgtgtgcttcagccacgaaagagaacatttctggagggtaattgggaaaattgagggtctgaaccccacaagaaacaatatgttttgacaaggaaaaatggctggcaaatgctaaggatttttaaaaattatttatttattttttatgagtaatcatgatgattctttaaataattatatctgccacagttgcttggatgtgtggcttcttgtcagtgaataaagttattttgttgtccttatttttaggaagagattcacagtattgaaatatttctaatgtcgatgatgttgcatttcctgaatatttttcttctagtggctgatgactcagcagactaccattctgtccctagaacactatggtgccaccagtcctagtcagaaaatcattcctatagttggtggtggaagggcaggtgatgggggtgggggcagtatatggttggaaccattgctcacatctttgaacttttatttatttatttattcccaggttttctaatactcagctgccctgttatctagccaacctcaaacaaagagagattgcattttggctgcagagatatacaatttggacactgtagtttcataattcaatttttttctacaagcatggtaaatgaggactaggactattattctacctgaagactaaatacagtgaacggacatgaaccccaatgtcctcttgtatacagcaggagcttaaagttagggcagccgaaagcttgtctggtctggtccctggtgagaagagcaagaatgaccttacctatggattttcacacagagggaatggacacacaggatgagccgactcataaaaggactggccttagtaatgtgtcacatattactgaaaaaatctacacaaaagaattgtttgcaaacatggtaagtagatctcatttgtttcttacagcaatcattactttaaagccagtgttcttactatttgcatgatactctttctatccttatactctcaggccttctcttgtattgtaatgctgttatggtggagcagtgttgaatatttggcagcaatgctgtgtttggcctccggttttttatttttatcttgtgcctttttcaggtagaacctaggactttatgtacactatgcaaacatgctgctgctaaggtgcatccttatccttagctttggaaaaatgattgataaggacacttgataagagtgggtagtagtagttaggatagcagaggtgttagtgattgtgtaaaaaaaattcataaggttactggagccaacatcattagtgccataaagtcacatggaaaggtgactatggaaacccaacaacatttgtgtttcatcacgcaggaagggtagatagcttcaggctctcaagctctgggctctctttcatttcagtaagtgtcctcgtgtcatttctattatgaaattccctgagaaaaacaacttaagaaggtagggtttatttggcttacagtttcatgtgagtctagtattgcagggaagtccaggaggggactcaaagcagtttgttacactcatagtcagaaagagagagaaccaacacacatctggtacaaacccagggaatgctgctgcccacatttaggctgggtttttcccacatcagttaatgcaaatcaagacagtcccccatagatatatccacaggccaatctgatataggtgatccctctttgaggctctattcctagatctagatcatgtcaggttgataattaaaactaaccatcccaatgagttataacagtctttttgttatagcccaataagaaaccaataagaaccatagcccaataagaaaaaaaaaaagataaatgggaatgagccatcctaaatcctaaatagataagtattttttcaagatctgaatgtgtagaagagctaatcctggatgttcatatggggaggactcagagtctgctacttagaaagataaaaatggaggtcctatcccaatagctttcaagtacctgagtctagaggagttagtcacagagaagagcaggtttacagagtttgtaagcagtggacagtgtcaacagagtctctgagtatctggttagaatccagagcttgtcacagatggagggtagaaacatcaggaccagaagcaacaacagccccagcccaaggctctggactcccattgtttttttaaacattaagaaaataagaaaagattagatacttgtacatctattataaaattggttctttacttttctcctttgtatactagagtcaccttaaattgcttttcattaagacttggaacagtctcaagtatagtatattagtatatgtatacatatatgcaatatactaatgcatatatagaaatgacacaatattttgattcataggtatttgaagtatcctagaaaataaaccatatgttaattttgttttagagtctagaaatgtatgaaaactagaccataacccccacaagggaaagaggaaatgtgatctgtgaaataaagaaatgacattgcctccacctctgtgtaggagagggccagatgtgtcagtgaacattatgatgggtaatgaaataatctagtgttattatttgagtgtattaagaaatatgtgggttagagtgattgctcagaggataaaggaagctgctgctaagcctgatagcctgaattcagttcccaggacccacatggtggaaggagagaacctattcctgaaggttgtcctctgacttctacatccatattgtggcacacacacacacacacacacacacacacacacacacacacacacacacacacacacaccacacacattaacacatatacgaataataataataataataataataataataataataataatgtgtggattctaaattggacctgatagcacttgcctatgacagtcagctacttaatgtagttttaaaattaatcatttctgttgatcagttttaattacttcccaagaaactgaccaagcctgctttagccttttgcagatgtgccatgatgatacacactctgaaatggtatgtttatatccaaccacaattttaaattaatctcggtgtatcagttgcctgataatcagaaaacatttttattgcttctgactgtcatgaagcaagcagatgaagctggaaggactgccattcatctgactggtcacaagaagacatttgctgcctgacacgttctcatccaagccaacagcacttacaattacacagccctgaaatatactgtcctactgggaggttgctttttttctattataaatctctaattctgaagaaaactacttgcacctttccgcaaggtcatcattaaggagttgctacatgaaagggacagatacatgcgcatcctggagaaaggcaaagatgtgagatgctggcagttcctacacaactcaatgttgccaccatatgattaagcaattgcactctttaatttttcaacaatgaatggatgcacttctatacaaaaacttgcacatgaagtttacataagctttatgaataaccaaaaaaactggagacactccaagtttttactaaccactgtccttcaatagagtaaacaaatgcggtatatccatacaatgtaaaatttcacagtgggaagaaatgagctgttgtgatggttgattttaaatgccaccatgccacaaaacaggatcacaagagtgaggaacctcagttgaggaattgcctccaacaggttggcctataggagtgttcatggaggactttgattattttaattgatctggaaagacccggccaccttgtgggtggaaccttctagtagcagcccagatttaaaaagaacacaggagaaggaagatacttggtgtctcctcactcagccgtccctgtttcagctactaattcctttgctgatactagaaccagattttctggacttccagtgcagacagaggagtggtggttcttcaggatttatttcaggctgggacagttgaggtaccaagccttgtggactgaacagctgttggcctttcagtttccagattgttgggttgtgagtttgtatggcagttatacttggcctgatagtttcttgatatcacattagagtaagaatggaattctctcctctaagcatctggcttatttagaaaacagaggtttatgggtttgtaaggattccaactggcttttgcagggtcttagcccaaccaaggaaggctgagcttggtctgaggaaaggtaagttcccagcctcccaggatcctgaagacaatcagatgcagcagggagtctagtcaagcaggaactcatttattgtcccacagcaagcaccttttaaaggaaaaaaaaaaaaaaacctggagagcgggaaaacagtcagccagtggttttaaaggtcagcctatcatgcgcctaggcgccctacacttcatccactgaatgccagctgttcatgcagtgacctcatctggtttgatctaggcaaccaatcatctttttttgtaaacaactcaggacctgcccacctgacttcccctaagtgccatctttgactgactcatgtgccctacagctttattttccattctggaagactttatgcaatactttatgcatatatgtaccaatgcccctagtttctggctttaaggacagagaaaggctggcagagcagaaacaaaaccaaaaatcagattggttatttcagttacttttcttgtaaagggatcagggagacatgactggttagcaccaggtcactacaatggcaaagatggtatggggttggcaatgagtaacatgtgcaagtaatccattgtcattgttagatccatgtctcgtctctcttgtacttctaatttaagcagaaatctaacagtcattcttaactctgttcttccaatggccttctagattttgtttttaacaacctaaaggctgatttttcttgccctcatttcaggagaaatgaaagtttattttatggactctgctatgggcctgcgatgccatttaagggagtcagcctgcctccatgagtttactcttgagtctgatgatgtctcactttcttctggtggatgtctccaaagcagttgtcagagcctattgtgaaggagtcatatggccatggtctagtcacaaggcccccaaagtccccacattcccagcttgaaaatcatctaggataccttaggaatcagtgctaggaatgtttgaggttttttttttttatttagtttttaaataacttgtttattcattcttttagaatttcataaaatgtagtttggtcatattcacacacccctggaagtcttctgaaatccatatgcacctctaacccacacaactttgtctcctcctccttctcctctttcttctgcccatggagtccaatttgttgttgcccagatattattaagtgtggggctaactcctggagcatagttgacataccagggactaagccttaaagaaaaccaactacctttcccagtgactatcacatgtcaatagctcctgcctcatttatgatgggattttgtctgcgctaagtttacacaggtcttttgtgcactgtcacaatctctgtgagttcatgtgtgtaactatcatgttgtaattagaaaacacgtcttcattgtagtcacccattgcttctggctctctcttatactctttttggcctcctcttccctgacaatccttgggaataggcatattatagatatctcctttggggctgtgccctctgcagtttctcttcatgttgatcagttgtgggtctctgtgttaatcagcgtctactgtaagaagaagcttttctaagagggctgagtgatgtgctggtctatgagtgtatcaataggtcattaggacacagtttaataccgtactgccctaaatatgcctgatattctctattgtttcttcaatcagttataagatgctttaaagaatatttttgtttccctaaaaccaaatgcaacatccagtcactgacattttatggctggtgaccttttttcttttccttagttgtacttaaacattcgttatagaacttagtacaacatgataccttctttataatgtcctagaagaaaacattccctgccaacctaaagagaacaatataaggatctaagagaccagagttctagtcttggctctcttattaagtaggtattgaccttggtcacgtccattaccttctttggtcccaagttttgtcatccatgaaatggtaaaagttagacatccttacggttcacactaactcaacacttgaatctaggccatcttgttagactagggcaaaggaagtggcagggtaatagaaacgaaattgctcttttctctgtgtgaagcacctgggctgtttccaaatggaaatttcagcattagcaattgcgagcaagagatgccccagccaagcttagtgagacgacagcagctcaggcataggactcaggctatgcagtcccacgatgtatatatctggcaccacctcggacttccacatgaatagaaacgaaagacttcttagctttcaaaaataaaatgtttcagatttaaattggatttgcttttgaattattcttaggaacaagggggaaattagttaaacctccaagtcattctccaaccttccatctgctggctcacccccacgcctccccaataccttctgtgctcctgttctgcccctggtacccactgtttgctgatcctctggccccttctccaggcccttgtgcctgtacacatttgtaggctacaactactgttgccacctgaagcccctttggagatggtctctatccttccaaatactcccccacctgcctgaatgacactgctaatgcagcggcacagctacggctataagccagcgagcctctctgagagccaatttctctgggttttatgtttcccatagttaccatctgtgagcacattagcaaacccagaaaggcctagaagctctgcttcttgcctacacgggtgtgttgtcaataacgcagttatataacttattactgataattatgcattttatcatttcagggatctgtggtttgttcaggttaacttcataagggccttagtctggctctgaatactgccaaatctctgaatgacatggccagagatagctatgtaatttagccacgtcaccctccactgacacctcacagctgtctaaatgacacccactgttgtttactttgctgagaactgtctccccacagttctggcaaaaagatgaagatgagtaacataatgaataggcaactagaaggggaaatttagggcaatttaaatgcatctacttctgccttgatgaattgccgtgaacagcatgagacagaaactggcaacatgattttaaatgctggagacatgaaggccaatcattgcttcaggatcagaatttgagaacagatgtacagactttttttctttttgctcttcagtttactctgttttaaaaaggaaaagaatttgcttttgtttttaaattatgtgtatgtatgtgagtgcaggtacctaaggaggccagaagagggcatgggatgccctggagctggcactacaggtgtagagctgcctggtgtgggtgctggaaatggaactctggtcctctgtaaaagccattgagccatctctccagcccctccagcttactctcagtatgactcatttaaatacatctcatgtttatttgtatcttgctctaggaaggaccaaaggaattaagaaaagtcattacttttaccctcagaccttttgtatcctggtagtttaagttcatattcttttttctctgatttctcttttttaaaaagattattatttttaacatgtgcgtgtgagtgagtgtgtttatgtgtatgttcatgtgcctgaagaagccagaagaaggcctggtgataagagttacaggcacttgtaagtggcctgatggggatgctaagaacacaactctagccgtttgcaaaagcagcaagactctcaatccctgtgccaaccctccaaccctttttctattatctttattggtttttgagacagtccctctatagaatacaaaattgatcttttacactagatcttcttgtctcagcttctcacgtgctgggatttataggaataagccacaatgtctggatcaatttcttcttctttcttctctattacccctgggtccaaatccagctctatccacttagatatgcagaattagagaaactaggaaacatgtctggatatatgtgtatccacagccaccataaccgatttaataagggcattcaataagtttgttgaacatgaacaaacaagttggtcaccagacctttttctctgattatttttcaaatgtgcccagtcttgagttatatataaagaaattctttctgggcatgatagctgcatgaagggaaggcattggtgatctttcttccaaattcctatttacataagaagcaaaaatattttctaagcatctgaaaaccacagataaataccattcctacacagtatatttggggctggatgggtgctctcagttatttttgagaggttcagagtgctgtggaaggacatgagaaaaaatgcgttgctgagctcctctgccaagttatgaagtttaagaactgctggcaagaagaggctctgaacccatccttctctacccccagcagtaggatttggactttcaccagtagacccagattttgcagttgaaacacatttcatggggcctagaaaatagagcacacacagaaatagttgcatcattcagaaataagcaaacctactgccttcctctgaaaaggactttctgcttgaataggaaagaggatttaatcttaacaatattctgacccctgcttgtgtgaaattatactaaatgttgtgtcgggaagacagtttaaaggatatggtgggttatatggggataaacacaaatgctgggtgtgagaaaggggctgagttaggtgagggcacagagtagaagttactaatttcttagttgtaaataatgaggccaaatcaagttaataccccaaataatgtcatgatcttcctacttgtagtttgccttatttatctataaaatcatttcatttgaggtttgcttcttatctgtatctcatctcatcttctgtagagtggagactttattgcttttatttttatctctagcaccaagtgtgaacttgatatatattttgatacatgcatatttctttaatagataagttcaagggaaaaagaaacactcaaaagatcaggggcaggttaaaaagtgcaatttctccttgcaactgaaaaaggaaatctggacttagatggagggttactaaattcacaaggaccatcgcacaaggaaaggggcactgtgaattccaggaaatgctctgtctgtaaagtctgcaagtgtctggggaagaaggttttcttgactagggagaagtgaggaatatgagtggatagggtgtggcttggcctagctcaaggtggtgtgaataggaatgttttcattttgatgtgtgcttcatcttaggaaagatctgtggcatggaggaaagcaaagaaatttcatcaagttgccttagtaggcagtttgcccagatcagtcagtaatgaccaaagaatgaaaattttttatattcttttttccattttttatttaatttttagaaattataatttcacatgtcaatccattctccctccccccctcccccagcctcccaccagcctcctcccccctcacccctctgctccacatagagggtaggaccctccatgggggctccccaagttccacatcatcatcctgggccaggcctaggccctcccccatgtgtccaggctgagagagcatcccttcatgtgggatgggttctcaaagtcccttcttacaccaggaaaaaatactgatccactaccagaagcaccatagggtgccgaggcctcctcattgacatccacttttagcgtctggatcagtcctgtgatggcctcctagacagcagactggggtccatgtgctccaccttgttcaggtcaactgtttctgtgggattcaccagcctggtaccgacccccttgatcttcattcctccctctctgcaactgggttccagagttcaattcagtgtatatctatgggtgtctgcctctgcttccatcagccactggatgagggctctaggatggcatataaagtagtcatcagtctctttataggcatttagggtagcctctccaccattgcctagattgtcagttggtatcatccttgtagatctctggaaatctcattagtgtcagatctctcctcggacctataatggctctttctgttatgatatctctcatcctgctctcctctattcttctcccaactcaatctttctgctcgtgcatttcctcctctcccctcctcttctcctcctcacattctgcaagctccctctcccctaccctcatgctcccaattagcccaggagatcctggcacttcccaatctccggggaccatgcatttttctcttagagtccttcttgtttcctagttcctttggtgaagaggattgtaggctgataatcctttgttctatgtctaaaattcatatatgagtgagtacataccatgtatgtctttttgtgactgggttacctcactcaggatggtttattctagttatatccatttgcttgctaatttcaagatcccattgcttttttctgctgagtagtactccattgtgtaaatgtaccacattttttctatccattcttcagctgaggggcatctaggttgcttccaggttctggcttttatgaacaacgctgctatgaacatggttgaacatatgtccttgttgtatgaacctgcattatttgggtatatgctcaagagtggaattgctggatcttgtggtagactgattctcactttcctgagcaaccgtcatactggtttccaaagtggtcttacaagtttgcactcccaccagcaatggaggagtgttcctttttctccacatcctctccagcatagattgtcattggtgtttttgattttagctattctagccggtgtaagatggtatctcagagttgttttgagttgaatttctctgatgactaaggatgttgagcactttcttaaatgtctttcagctattttacatttctctattaagaattctctatttagttctgcaccccactttttaatttcattgattggtgttttggtggctagcttcttgagttcattgtatattttggaaatcagctctctgtcagatgtggggttggtgaagatcttttcccattctgtgggctgttgttttgtcttactgactgtgtcctttgccttacagaagattctcagtttcaggaggtcccatttattaattgttgatctcagtgtctgtgctactggtgtgatgttcaggaagcagtctcctgtacaaatacgctcaagggtatctcccactttctcttctggaagtttcagtgtggctggatttatgttgagttgtttgatctatttggacttaagttttgtgcatggtgacagatatcgatctatctgcagtcctttgcatgtccgaatccagttgtgccagcagcatttgttgaagatgctatcttttttccattgcatagatttagcatctttgtcgaaaatcaggtgttcataggtgcttgggttaatatcaggattttcaattcagtcccattagtctatctgtctatttttgtgccaataccaagctgttttcaggactatggctctataatagagcttgaagtcagggatggtgatacctctagaggttcctttattgtacagggttgttttggctatcctgagttttttgtttttccatataaagttgagaattgttcattcaaggtctgttaagaactgtgttgggattttgatggggattgcgttgaatctatagattgctttttgcaagactgccatttttactatgttgattctacctatccaagaacgtaggagatctttccattttctggtatcttctttaatttctttctttaaagaatcaaagttcttactgtacaggtctttcatttgtttcgttagtgttaccccaagatattttatgttgtttgtggatattgtgaaaggtgatgttcctctgatttctttttcattatgcttatcatctgtatatagtagggctactgattttttgagttaattttgtaccctgctactttgctgaaggtgtttatcagctgttggagttctctggtagagtttttcaggtcacttatgtagactatcatatcatctgcaaacagtgaaagcttgacttcttcctttccaatttgtatccccttgatctccttttgttgtcttatagctaggacttcaaatacaatattgaagaggtatggagagagtgttcagccttgtcttgctcctgattttagaggaatcgctttgagtttctctccatttagtttgatgttggctgttagtttggtgtatattgcgtttatcatgtttagatatgttcctgttattcctgttctctccaagatcttcaccatgaagaggtgcaagattttgtcaaaggctttttcagcatctagtgggatgatcatgtggtttttctttttcagtttgtttatatggtggattacattgatggattttcgtatgttgaaccatccctgcatccctggaatgaatcctatttgatcatggtggatgatttttctgatgtgttcttggattcgattcaccaatattttgttgagtatttttgcattggtgttcatgagggatattggtctgtagttctcttttttaattgtatcattgtgtgacttggttatcaaagtaattgtagcctctaaaaagaatttggcaatgtccctcttgcttctattgtgtggaacaatttgaggagtactggtattagctcttgtttgaatttctggtagaattcggcagtgaagccatctggtcctgggctttttttttggttggaagggtttgatgactgcttctatttcattaggggtcataggtcgatttaaactgcttatctgttcttggtttaattttggtaagtattatctatgagaaaattgtccatttcctttagattttcaaattttgtggagtacaagttttcgaatatgacctgatgattctctggatttccttagtgtccattgttatatccccccatttctgattttgttaattatcatgctctccatctgtcttttggttagtttggatagaggttagtctatcttgttgatcttctcaaagaaccaactctttgtttcattgattctttgtaatgttttcctagtttctactttattaatttcagccctcagtttgattgtttcccggtgtctactcatccgtggtgagtttgcttctttttgttctaaagctttcagttgttctgtcaattctctagtgtgactattctccaatttcttcatgtgggcacttagtgctatgaactttcctctcagcactgctttcagagtgtcccataaatttgggtattttgtgtctacattctcattaaattctaggaagtctttcatttcactttttatttcttcttcgacccaggaatggtgcaattgggtgttattcaatttccatgagtttgtaggttttctgcaatttgtattgctgttgaattctaatcttaaagtgtggtggtctgataagatacagggtttatttaaacttttttgtatctgtggaggtttgctatgttgccaatttgtggtcaattttagagacggttccatgtggcactgagaagaaggtatattcttttgtgtttggatggaatgttctatagatgtctgttaattccaattgggtcataacttctgttagatcatttgtttctttgttaagtttctgtctggtggtcctgtctagtggtgaaagaggggtgttgaagtctcctactataagtgtgtgtggttttatgtgtggtttgagctttagtaatgtttcttttacaaatgtgggtgctttcatatttggggcatagatgtttaggattgagacttcatcttgatggacttttcctgtgatgagtatgaaatgcccttcttcatctcttttgattgattttaaagtctaatttgttagatattaggattgctacaccagcttgtttcttgggtctatttgagtggaaaatcttttcccaaccctgttactctgaggtaacacctgtccttgaaattgaggtgtttcttgtatacagcagaaggatggattctgtcttcgtatccattctgttaacctgtatatttttataggcaggttaagaccattggcattgagggatattaatgtccattgattgtttgttcttgtttgttttggatttattgttggtgatgtcattgtgtgtggattttgccctcctgttttttttcctgtttggtaaagttggattatctattatctatgtttttgtgagtgtagttatcttcgttgggttggagttttccctctaggactttctatagtactggatttgtggatatgtattgtctaaatctggttttgtcatggggtatctcgttttctccatctatcgtgattgaaagctttgctaggtacagtagtctgggttggcatccatgttctcttagtgtttgtctatccaggaccttctggctttctaagtttccattgagaagtcaggtgtgattctgataggtatgcctttatatgttacttgacctttttcctttgctgctcttaaaattttctctttcttctgtaagtttggtgttttgattattatgtggcgaggggagttccttttgtggtccagtctgtttggtgttctgtaagcttcttgtactttcataggcatatccttctgtaggttggggaagttttcttctatgatcctgttgaatatgttttctgtacctttgtgctgtatttcttcactttcttctatacctattattcttagactcggacttttcatagtgtcccatatttcctggatattttgtgttagagatttgttggacttgagattttctttggttgatgactatatatcctctagtgagtcttcaacaactgagattctgtcttccatctcttgtattctattggttatactcacatccttagatcctgaatgtttatccagcctttgtatttccagtgtcccctcattctgtgttttctttattgtttctatttcagcttttatgccttgaactgtttccagtgcttccttcacttgtttggttgttttctttctttacattctttaagagaattacttatttcttgaatttttggttgttttttcttctatttctttaagagattttcttgtttcctcttcaagggtcttgaacatcttcatgaagtagatttttaggtctgtcttttcttcttcctctgtgttgtgcttttcagtcttgctggtgtggagtccctagattctgtttgtttcatattggtctttctgttgagtgtgttcttattctgccttcttcccatctcttcttccagtgggtgcaggtgggggtctctctatctcctcttgtcacccggtggtgtgtgtgggccaagacttcaatgtctgcagctcaggagaggttgggatggcagaggggaaggaagagtgaggtatttctagactcatggagatcctttctgtctaggcaggtccactctatgcaggtgggtccactctatgcagctgcaagcccagagagatcctgtggtgatgggaacattgggcaggagtagggctcaggagaggtcagggcggccaaagaatgagaatttgaagggttgtttactttgttaggctgatataacatgagcaattcatcactcatcattttggggctagaaatccaagatcaaggcactagtggactaggtgtttgcccagcccactttccccttcacaagtagcacctttctcctggaacatcacatggtagaaggtcaactgagcgtctttgctttgatattataagtgactaaccccattatctactttcttgctctggtcacttccaaaggtccaatgccttaagacatcaccatggggatgagaatttctgcacacaaacactggaggatacaagcattgagaccagagagaggaccatgtctgattttgtcataggtataccaccattgttcagcctgtgtctaagtcataaatggagactggtctttttgatgagaagtgattattgactgctactatttttcacactgttaacccacaagagtttggtcatagtgaagacactcatgccctgaaagatgagaggatggcagacatggtgattgtcacttagttgtcccctccagtctcaggcttagtcgagaggctgttctctaacacccacttcccatcatcaagtgtagccgccatctgccatctaagttacagactcttaagtcttactttgtcatacttcctatgggtcatcgaatgacattattggagatgatgattcaatgagagaactcagaatatgttcctcattttattcagcattctgccaaccagagtgatagattactaaagttaaaaaaaatgatgctctcagctgtaaataatttataggctcaaggaaagttggaattaagttgtttatgctttcttgcctctgaatagcttgctgtgggaggcagccctagttcgtaaacctcgtttggcaccaaatcacaccggttctgtggctcttattaaatgcataaatcttgtgtttttcaaagtgcggctacacatgaacaaccaacctcaaacatttagtctagttctaaaggacaaaaagcttggggagtgctggtctccgtttgaaaatactaacatttgaagtgtgttaacaggatgcctcagagaggtcccggcacctccccaggtaatggccagcttctcagctcagagagaaaggtggcttctttccccagccttccctgggttgacttgatgctgtaaaagaagaaaacgggttccatatcagagggggtagattgaaacattcttattttctagcccttgggagggggtggatggcatttttcaacaagcaggaaaaaatactttaaagcacaccaaggaaattctttttaacaagtttggcaagaaaaatattaatctccattttgctgagaagtaatacaagccattatctatatcacacacgtcttgccaggcagcagactaagcagtcacttgatctttgtgacagtcttatgctatctttatccttgggatccacacagcaaatgtgaagcactttcctgggttcaggcaactacaatgtggtggatcagagcctcaaatgctgttctttctttgtggacttcccagccaatgcttcccatggcatttagctccaatatcaaatgcattaaatcactacacagacatagatagatagatagatagatagatagatagacagatagatagatagatagacagagattagaagataattaataaattaaacaaatcctttctctaccttggacatctgtgaacctaatgttggtgagtcaactcctctagatgattctcttttatggtctgtgcagagggaaagccaaggctcatggtgtcttggtaacttgcccaaaaatacattgtaattggaagatcctagaaaatcaccactgctcctcttatgaaaatcctctaagatcctgccccaatggcccaatgcctaggcattgtcttagtttggatgctgcaaaaagacagcaataccatggtaaggaaaacattgaattgaggagacttgcttacagtttcagaggttcagtccattattaaaatggcagggagtatggtggcatgcaggcagatgtgacatcttacaggcaacaggaagatgactgagacactgggtggtatcctgagtataggaaacctcaaagcccacccctacagtgatacacttcctccaacaaggccatacccactccaacaaagccacaactcctaatagtgtcactccctatgagattataggggccagatacatacaagctaccacatattcctaaaggacatagaatgactatcagaagaaggtagttggaaatacatgataataagtgaccagttacaatgatgagataacaattataattgtcatcagcatctctttattgattacattcatttgtatacacatattaagtatctttgctttctttcatttcttattcccttattgcataacaaaagctatcaaacttcctatcaatatctaaatatagttaatttttgagtatcatatttaaattattaagtgtcaggaggaaagtaaacatcattgaaggactttaactctttttctggggaaggataagtgtttagttttgtactgggaagctgcttatgttggatggcatgaactggttatggtctttgtttcaagattaagtgtgttttaagaggtagtatatgggtacctatttggtaagggttggactgtggtgactaatagtatctgttgatttcactgggaaacagacgaccaggtatttggccaaacatttcatttggtgtgtctgttagtgtaagtcagtgggcctggggaaaaaaattcttccttagcaatgtgaggtaacatcactcaacccaagtgagacctgcacagaacaactcagaagatgagtttctgtctttcctcttgggaagggtgattatgtcattgtctgcccccagcacaggcatctctatcttgaactcagatcatgacttacattattgctctttaagttcttagctctcagaattcagaataatttatgtgactggctttcctgttcctctaccttgaagatgccacactggggaacttcttagcctccatgatcttgtgaaccaattcctataaatgtgtgtgtgccatctgtttttgtccctctctccctctctccatttgtccttccctttcttcattcccctgacctcctatatattgaatatatattctattgatattgatacattgggcacattatatttaatacataacacacctgtaaatatattctatttccttggagagcaccaccaactatggtattttaagaattgaaacaaagtgattttctttaacagaatatactggaagtctttccttggttggcagagatccagggcagtttggctccacagcatggctgtgaccactgagctttgtgaagtatccctctccagaggaaccttgtaccatttcattaaattacttttgtcttcaggatggaggtttattggttctcggcacaaccgggaaatcatctcttttggactatggagagtcttgattactcctttcaaattagttttctcttcctctgttggaacttttaatcagtacagcttatgcctggcaagatatccagaaagtggaatactcccaggccgctcagggactcatttcccaggggacatatttcttactttgtctgataaaggacaatgacagaggaatgtaaggcatttcatgtagaatgttgcatcggatcctgcaacactcttgtgatgtttcaaaaggccacccaaaggctgagagactgagtaatctgtacccaaaatatgctccaagaaatggtgatctttgctttcagttcagacttgaagtatttgccttttgtgttgtagctagttactatctactatctactactggccctgacttcaaaatgagacttaaataattctaaatgaatgaatctatcacagacaaaccacttctttgtcatctgtagggagacagaaaaaaaagattgtcagacaccctcaccttaaccactacaatctttttaaactctaattttcttctgggagaaaaatggaggcactggatatctccctataacctgcattttatggttcctgtttctgtgctctcctggcctaaagatgttcattctgaagaacgcaagcttccctgagatgatgcaacaatgatcctattaaactcaaaattaataccaccagccagccactttaggattctcatacctccattgacaaggcaaagacgggagctgggagaatgcatggaccatcttttttttttttgtattttgagagaagtcattattaaaagttttctggatgtgttttctcttttccaggtgtagttctccccactacgtacataccaaagaattttccacaaatcaataaaattaattagatttattgccctagtgaaaagcagttatggatagctgaagtcagtagggtagatagaaggtgatgactacagatgtcttgcaacatcagacaggaaggggaagaggaagttcttcctgggttataggggaggtattaaaagagactcagagatgaccaaagagtcacgatgttccctggatctccctgcaacccagattatcaagacttgaggatttataaaccaaaataacttcaataaagcaaaaagtgtcaggaaatacaaacaatgctctgtccatgagtgggccagcaatgagtgtgtgtgcatgtttatattgtgtatgtgtgtgttttgccatgtccttaagaaagctctgagtcactcggaataccaaatgataccttgtgcacacaaatccttttagcaaacttagtagtcctgaaaatcaaacaataaaacaatacttctaataattaaaaacaaaacaaaataaaacaacaactcccagatctcataccccttagtactctttgcatgtgatttcattgctcttccccagttggctgaataatagcttagtggtctgtcctactttctttgtcagaatgaagaacttcttaagaatcatcccagaaaatccacctggagttatgaaagtcatagcagaaccatacaaacataacagaatggggcaaaaagaagagaggatgaccccttttccaaactgccttagttccattgtgatactaacaaaatccttgagcctggatcacttctgaagagcacaaactgatttcctatggttctggacgatgggaagttcaaggtgttggcattacgttctagtcggagcagtgttttctcccaagatagtgcctgttgcatttaaactattttacacttggccttctaaaatcctgttcttcttatacagggaatgaatccactccatccacaaaggggttaccagcatcaatatttaaaatataggtgcagaatctcatgtgtcatctagatacacacacacacacacacacacacacacacacacacacacacacacacacacacacacaccttgaagggtgatttgtcctgaggcaaatttctccttgctgcatgtcttctcttgggagacatgtaaaaaatgtctgttcacttcagataggacactgatgaaagactaaagaacaactctactgaagtctaggttagagaaacttgttcattggggttgctttcaggagcatgcatgactcaaaataagttgcatcaccaacaagcccaccctatcatgggtgatgttcacagacactgtattcctggagctccttgcacagtgaagcctgcctactgaagattctcctttgccccagagattgcccattgcttacacaaccatgaagaagggtctgctgagccttcaaactttctgaacatcctcagcctcctaagtgtcatgacctcctggctcctctaagttttgctagcttcctaagttaggacttgccctacttcctacaggagagattgtttcagttcaggggaaatagttatacaacattcttccagctgtgtgtgagtctgatagcaagaaatctatgtgcttccaaaatatcctggtaagtgataaacacagtcattccaaatggaagctacagaaaggaaaaggggagtaaccagtctcaactaagtttaactttcaatacatgaaaaagacattaaatctcaaggcaaagtaatcattgtctccatgtccatccttccagctaccttgggtaggggccagggctccttggctctagggaggccttccctaaggctttgctgggtgcaacatatattatagatttctaaggttggagtctaaggctctggcccatcctgggctatcactgtaagcttctgactcaagggcctgtgttttagctgtttttctgtttttctgaccccgcctccccactaaggatggtctatggaaggtctctctgtggtattcttggacttatggctatgtaggcttttatccaatggagacttccagtggtgacctactcccatggatccagtacaaattgccctagagaggcaatttgtatgaatacgtgtgtgtggaggggaggagtatgtgcacatgagtgcaggtgccctccgaaggtagaggcatggggatccctacaactagagttacaggtagctatgagctacctgatatgggtgctgggaactgaacctggatcctgtgcaagagaagcaagtgctcttaaccattgagcctcctacttcatcactcaaattcttgttgcaataaagcactagagcacagacttgattcagtcagagtctttgccactttgcaataagaattacctttcttctagttttcaatatgacattccccatttcccctaaaatctcataaaaatagcttttttggttcctatttatgccaacattctgatcataacttctccaacaatttctttgaagattttcattctgttttagccatggcccactgccttgtgcatgacaatccagactttttctagcatgcatttttcaaacatttccacccactacccaatgccaaagcttcttccttgttttatttattattatattattattattattattattattattattattattattattatggcttttcgagacaggatttctctgtgtaacagttttagaactcactttgtagaccaggctggccttgaactcagagagatccatctgcctctgcctccagagtgttgggatcacagatatgcaccaccactgcttggtgcttctttcctgttttaaggtgtctgttcttgcagcattgaacctccagcactgactctgtcttggtatcatattcacactatagaacagtggtttgctctctcttggtatcatattcgcactatagaacagtggcttattctctcttggtatcgttttcacactgtagaacagtggtttcctctctcacagggacccttgggccagcacttcttacttccctattagaagtgaaggaagctgggaagcatgtagacatagagggcataaagaacgtggactatgaatagaagtgaccggaagttactgtctgtgttcaagtggcctgtacctctctggcggccctcacatttagagctgctattactctggccagcacctgacttagtgagagtcttagcatttggttatcttgaaggcctcctgccatttgcagtgtatcctctactgcctcctgtcctttactgagttgtcaaagtagagggtgaaaacattgcaaaaaatacttgagtatttacctaaaggtgttccccacgtagcagttcattcctctctcttgtttctctctttaccatagactcagccactaaagaccttgactttgatgctttctgctataccgagctctccactcacctgtgtggtcatccagaaaagagcatctcgagtacatgctgacttgtaagtgcatctttaaaatttcattatactgatcaaatatgtctccatagtaaatgagagtttcaaaagacaaatttggcagattcatgaaaagtacaaggcattatcagagtctgagggactcttttcatccacaccagaaaacagcttgcagaaacaaaagctgtctggaatggtatacacagctctctctccagggatcatctcagtaaaaagaccacagtggaaatcttccaagactggtgtttagtgtgaacacatccaaggggaggaacctgttcttcaggccaaggcaagcacagtttaaacttcaagaagattgacaggcttacatagtcccctttctctagggttgtcccagcctgctagaaccactgtctggaattggacagactcacggtgagatacctaagaaatgaagcaccatcctgccctgcctgtggctgacagatgcagtgatgtagcaagaatagaagtctggcacagtggcttcttttcaggatgagcctgtggtgtggttccgatgtctcagacaggctgagcttcaacagaaatctcatccttgcctagctgctgcctctgacccatcctgtagcccatcttcttacagacacccttcatatcactcccgtgacaagctacaacacaaaatccaccttctcacacccacaggacctccaatgtatgcagtgtacacagggcagtggattgttctatggagcttggagctatgggccatgcaacctttctttaagtcaccaaagcattgccttgcctgggtaggtgctggtaagttccgtggctctgaatcagtagctgttgtaataaacagatgtttaactttgaaagggttaatatagtaaacagttatttactcttaattttagagttcaatgcttacagcccttttggtgggttaaagggttgtgtgtgtgtgtgtgtgtgtgtgtgtgtgtgtgtgtgtgtgtgtgtgtgtgtgtatgtgtgtggtgatctggtatattgctgcctttcttgatggttgtgtggtaggtaggaaagtagccacagtcttttccacttcttaaagagatggaatccatgcagctatgtcttggattagggttggcctgaatgatgcattgactaatggaatattagcaaacactacacaaagaaaggattgacattcatgtgcttacttatttggggacccaggcttctgtgagaaagaacctcaggtaacctggcagatgatgagaaacttaagccaagatgtccagttagccactaggtacctaaggtacctagtaccttaggtagagagctggctcagttgggattcatagaatcatgagttaaataaaaatgtattttgttaaactactaaaatcattcatcttatacagcatataccgatcaatagggtctaacaaattgtgataattcatattgatttccatggttttgactacaatagctcattttaggctcacattgttatcttgcaaacatgtggaccatgacatatacaaatgaaagcttgcacaaagagatatgctcatattaaaaggatcttttaaatcaatacaagaaaggatgatcctgaaatctagactgatgagtgttacagatgtccctaatttacagtctaggtaagaaacgcatgaatgagaagcttttatgttcattgagtcccttctgagagccatgaccctccacttctgctgttctttcatgctgacatttctgtggttagtgagttacagccacttccacggaagagaaaacaccgccgagagccaaggaggtagcatggtgactgtcagcacatgcatctctaaagattagcttagctgcttcaggtacctcccacagcccaagaattttcaataagtggttatttggaaatacaatggttcttactgaaaaaaatgtgctcattactagacaaattggtgaatcctatataataccttttcaatcttgccctctaaggcttatagggagttttatgtttataaaaaatgtttggaggtaggggaagtgagatggcaccaagcctaacaacttgagtttgatctccaggacccacatggcagaagaggaagattgactctctcaggttgtcttctgacctccacatgcatgctgtggcacaagtcatacatcacacacactcacatacaagcactcaaaataagtaaataataaagatataatataaataaaaattatgcaaacaatgaatatttccctcttgtactctaatataacatttctcaattttcagaataagggacttatttctaaattgtcaaatatatacagttagccatatgtaatctaaactacattgtcatgcttaatatatatgatactgtaaggaaatatcctcttttgtgcttatgtgtattagctcaaccctaagttccagaaagatgagaacaaaatgtaactttctctcaaggttctcatatttcagtggagacaaaaatgcacatctaatttaaaaatacacagccagtaaatgaaatatgagcttatgaaagaaagcacacggaaaccaatatgcatggaagggagtgtgttcaggaaaaactttttcatacaggaagttgcaaatataagtcaccaaggcattgccctgcctccatagatgctgatcagttcggaggctctgggtcagtagctgttataatgaacaactgttcattagcagtgaaagtgcatttatgcttcaatttagagttcaatacttatagcccttttggtgggttaaagggttgggagggtaacttgatcctgaagtcactggaggtaaaaactgagtagacctttgtcacttcaatacctgtggtagtctgaatgtaattggccctcgtaagctcatagggagtggcactattaggagatgtggctttgttggagttggtatggcttggttagagggggtgtgtcactgtgagagtggactttggggtctcctatgctcagctttgcccattgtggaactcagtttacttcttgttgcctgcagatcaagatgtagaacccttagctccttctcctgcaccatgtctgctgtacaccaccatgttccaccatgataataaaggactgaacctctaaaactgcaagccaccccaattaaatgttttcctttataagagtttctgtggtcatggtgtctctttacagcaatagaaactctaagacaatcctcaacctatgattcatgatatacagaagtgaggaagcccaaggtttagaatcagcccagcatctcatttattccgacatgcagcactgtgaacactgcatgctaactgactacatggcccaatgggggctttgttctgttacctactattttcccatacaagacatggcctgtactacatactaagggtacaacacatgttcattgaatttacacatgatttagtgaatctatgagcacagcatacaatacaggcatcattcaataaatacttgtagcaaaaaactagagttttatatcttcctcttctccccttccttatgctcaaaattatcaaaagtagtaaaaaattctaagacaccagcattgacagactcctgtgttgtaaatgtgaggactatgcaggtggaaaaattctaggcaacatttgtctgctgggaactagagagaaaatgtaggtctgttgtccctctcctgtagcccagggacctttcttctttttctgttcatttttcctctgttccgtcattctatttcagggcatgagcatgtccatggagtgatgttccctgtgtttgggggaactcagatttattaaactcaggtgttactccacaaatgaagtgcaggtatatcagcaagggcaagaacacacaacagacagtggggaggaacacatgaaagccatgagacatatagctctacccctaccccattcagtgtgtccaaagcctggctatccctaaaacattgttcaaattagttcagcttttcccttcctgagagcctggcacctgccacttcagagacaataactgaacagaatctttcctctgctcaagccaggatcttatgtcaaatacactctgggacatttttcctcacacatttatgccttcaagtggttcttaattgaagaatcttctcattggttagccctgaagactataatttcacatgtcagaaggtgaaatttcctttccctttaagagactaatcaacaataatgcacatggaaagctattttcaaggatgcagctgagtttggaggacactgaggctatcagagctcagtacactgtttgtcagaactggctgaaacaaaccctggttcccagagacacatttcccatagcatcccatgatagttaatttccatcagccacttagctgcatttggaacgaacaaggggacacatttctgggcatgtctatgtgggtgtttccagagagggtcatttgaggagagagggcctattctaagtgtgagtggcagtagctcacaggatagaatcttgtcatccttcctttctcttcctccctccctccctcccttcttccctccctccctccctccctcccttcatctctcccttccttcattttctttcttctctctctgggataggtcttactccgtgcaatccaggctggcctataactcacagcaatcctattgtgttagcacttgattactggcattatgtgcctgagccaccatgtccagctatgtttacaattttaaagaaattttagagggacataggctatcttctattttgttgtatcatccaacataacactgaaacaagcatctctacagatgcttttgtctgatgaccttatcattttcagttactttctacccttgcagattgaatgtgtgaactccactttcatgatttttcttgactcttaaatgtatgaactaaattattggtgccaatatgaaaaattatttaaatagaatctgctttctttaaggatttagggacaagaaatagtaccttaggtaaaaagaaatatatttaactgcctgcaagctattgtttaataatcttagctttgagtcaatgatgcaactaatcactctgccaagaaagctcactggtgagacagctcagtgcatgaaagtggttgcagagtaggcctaaggacctcagctgacttgttcctggaacacatggtggactgagagaaccaactcctaaaattgtcttctgacccccatagcatgtttttaccctaagactctccatctttctctaacaactgcaacagtaatgataataataaaaatttaaattttaaatgaaatgaagccacccccctttttttttgtttttcaaggcagggtttctctgtgtagctttggagcctaaccgagcaatcactccgtagaccaggctggccttgaactcacagagttctgggattaaatcccgaattccgggattaaaggtgtgtgccaccactgtctggcctcaaactcccttttatgaaccagtttggcataagttataagaactccccataactgggtactgcagcacatccctgtgagcctagctcttgggaagcagaggcaaggaagaatgtatatgaagttgacctgggctacatagtgaattccaggctagccaaggctacatagcaagatcatatctcaaccgcaatctcaacagatgcagaaaagaccattgacacattaaacatcccttcacaaaaatatcccatgaaagaatagggacgagcagaacatatctcaacataaagactacacacacacacacacacacacacacacacacacacacacacacacacacacacacacacacacacagacacggcaaagctacagccaatatgatgctaaatggagaagaatttgaagcattcacattaaaatcagggcatcttctctctctcctatttaacatagtgactatcttcatagtagcctctaaaaccaaactaaaaccaaatgaaatatgttgaagtgaacctaactaagggagcgtgaggctgccaccataaagaattttagcctcataaaaaactcaagaaagacactgggctgtggaaagattgttcacattcatggattggaagaattgatattgttaaaatgaccatcctcagaaaagcaatcgacagattaaatgtaattccaatcaaaatttcatgccattatcaaggaaacaaatgatgccagtggtggtggcacacgcctttactcccagcactctgaaggcagaggcaggtggatctctgcgagttcaaggccaacctggtctacagccgggactacacagagaaaccctgtcttggaaaaccaaaaaaaaaaaaaaaaaaaagtaagaaagaaaaaggaaaaaaaaaaggaaagaaaaacaaacaaagaaacagctgacattaaatgctggggaggactcagacacagggaaaccttatacactgctggtaagaatgtaaactgttgttatcaccatggcaacctgtgtggaggtttctcaaaaagctgaaaatagaactttcatattacccaactctaccactcctggcatataaccataggactgtataacctatgaaagagataacatcacagccatgcttatcggtgctgcttctcttccatatgagagaagaaatggaaatagcttagttacccatcggctgaagactgggtgcatgtacatcatggaattctgatcagtgctaaagaaaagtaaaatagtgaaacttgtagggaggtggctgggaccagaaaacattatacttagtaaggtaacccagaccctgagtgacaaagtttgcatgtgctctctcatgtttggatcctagactagcattttagatctctgagttgaaattggagtatgtgtctgtagaagccagaaagaagccaaaagggtgaatgaaggaatccataggtgtgagaagtggtctagatggagaggtgatagtaaacccacgtaatacacacaagtagaagccgtagggagggagggtttaaatggggcttggggtgggggaataggagagaggtgggggtgattaaaacggtttacccaaactaagaatatattaaaaagccatataaaaactactacattattagataacttaaaaatgtggttttaaagtaaagagcttcattttgagtattctttattagatggatgatgtagggctgagaaatcatagatttttaaaccaaaattccaatgccaagtgtgggatacatccctgtgaattattgatttttgaatccctcaaaggcatgtttttcttttatctttttttttgttctgaaggtaaccaacctctccctcattgagtctgaggtctgcttgctccatatgaaggaatgcatgcttggtgttgcagaataggccaataacctatgtctggggggcggcgtcacaggccctatggcagagtttactactgatgttttgtaaaatgaatatgtagctaaactatgatctagatatttattactaaatccctatacttgcatctctcgaccttggccagagaagcctgctttggcagtggataatagccagaatgggaactcatcaatgaaaatgctgagaataaataactgttgagagttccctagatatttagaagctttaaaaacatactttaaagctacccatttggcaaataataattcatgaagagtgttggaaaatatacagaatgaaaataagaacactgtatattaaatttatgactggccataaagtattatgcagtgctttgcaaggcaacttgagtgctccttaaaaaaagttaaatgtaatcttatcataggatctaacagttacactttgaggaatctggaagaaaagtgaagatatatgtccacaaaacactcatatgtgaaacttcgtatcatttcataacagtcatgattaaaaataaaggtaaagcagttggtgaatgaattataaagactacattttagcaacaaaaataacaaactagtgaatcatggtctaagatgggtggacttcatagtagcatgctaagtgaaagaagcttgatgcaaaacactactcacgtgtgattatagtcatataaaatgttcaaaagacgaaaatctataggcagaaaacatattgcagccacatagacatggagaggaaaggcagacgtcaaatgaatgaaagataatattttggatgagttatagaaatgttcaaatatcaggtttgtgtggggagtgaacaactgtgtaagtaaaaaaatgactgaattgtacaatgtggtgaaaacattgtcttgcataaattatttctccctaaattgtgccctcaaatgagatctaagagggaaatgggtagataattttcagaaaagagactctgatgcatttgcaattgttgaagctggtttcttctgcttccatgtatgtttaagtattttcaaacaaaaaaggtcttcagaaatcaatgccaataaaaattagtaagccataagttcaattacaacttctggtgtctcaaatagaaccccttctccttaaagaaacatggtatcaatcaattgtcgcattacataaggcaatagctctgttttaaaattgatattaatgccagtaataaaaatgtaggaacattctgtcctacattaagctccaggacctcgacatctaagagtctgcctttaaataagaaaagtttctttatgactactagaattttaactcccacaatccaaaacatctaattgctagagcaaaatactttgtaatgtagtaagataattgagtttggagagcaattagccccctccagtgatgcccagcagaggtggtaattcagtgctatgctctgagtggcaataaggtctcacttcatgaaggtgatttactctagagatgacttcttgcattctggtcatcagaggacaatgtctgcactgcaagcctcggtcattccagcttctcttattggaaaggcatgaaggcgagaggagtgagtgttttttttttttttttttttttttttttttttttttttacagcattttgcattcctggctttacatgcaaatggcatcctgtgacatgacattagaatgctggtgtgctcagctccttaggatgtttatgtgaggttggagacaaaagaaggctgccttctttctctaggtagaccccaaggaccatcaggtcacagatagtaaacacaaactcctagaatcagagcacagtgcagaagtatgtgaagagaatgggggtggaggcatcactatgaaggctttgagaatctctgtgaatagaaagtagactgaagaataagggtggggaaacatccagggtaccacatgacccagatgaaatgagtgttgcttcagttcttggctctgtctcatacccacctgttgatttaatctgtaaggaaaaaccttcctatagatctcaatctaccggtcaccaggaaaattgctttcactgaaaatcaagattgaaattctactttgtagatgagtgttcagtcccagtttaactaatattaaacaaggtggctttgagggcatcaattcccatgaaggaggtcaaattcttcttgtacaattacagtgtgggattgcatcagcgtcaccccaactgctttggagtgaaagccttagagaagagctaaggacatcaccgtgccttagacctatccatgaagcataaaccaataatagacaagaaaatgatgtgaaaagaagtctagattacctagggcttgataaagacactttagataaaacaccaaaagtatgatccatccaataaaaatgacaatgctagactttgttaaagtgaaaatctcctgttttgtgaaaaactacttataaaatgaaacaggtaaagagaaaaaaattgctaatatgtagctgataaaggtctatatccaaaatatagaaacacctctcaaaactcaataagaagaaaacaaaccagctctcaaaatgtaaaaagactgaaaagggtacctcactgaaatagatagcaaagaagtttatgaaaagactgtgttttatgaggaagttgcaatcaaaaatagaaatgatatcccattgcacacctattgtgatgacctctataaagctgcggactccagttgggtgtggtggcacatgcccgtagtgttcataccagagaggctgaggtagaggaatgaggaatttacggccaagttgggagaaaactaactgctggccaggaagcacagtgattgggattctctgttgtgggaatgcaagatgcaggatggagatgccacttgggcagacatctatcaatgtttttaaagctagacattcttcccacatgacctgtcagttgctctctcgggtgtcaagggaattgaactttttaaaaatcttcataaaagcctgcacataaatgcctcatttctaatggcccaaggttggaaccaaccaaaaacaattctcagtagttgaatgaataaattacagagggttcatacaatggcatgacattcagagatgcaaaaagcaaatgagatatgaagtcatgagtgaaattgaaaatgcattttctaagtgagaagcctcggtcatgttaggacctactggcatgccagcctgccaaagggaaatagtggagagagcagaattagtatttgcaaggacttctgggagaaagagggatcaatgaatggacaaagtgcagatttttgaggaagtgagactatgttgtatgacactgtcatggatatatgtcattgacatttcctaagtatagcatgtaaatactagagtcagcactaatgtcaactatggacttataaatacaggtcttggctgagaacccatgagttacaccacatcaatgcaaagtgttaatagggacaattgggagtgaaagttaagatatatgagaattctgctttctgctcaaatttcctgtgaatctaaaatggtaatacccacataatcaaccaaacacacacacacacacacacacacacacacacacacacacacacacacacacacacacaccacacacacaccacacacacacacaccctatgaagtatgaaggtgttaaatgtacaaagaatttttttttgccaaggaaatttcagggatattttgtattgtttaagattctgtttgtgattaatatacaaatttaggcacaagacactgtgaaatattgcagtaaagaaattgctaaagggtattgcatacctgtaattctatcattgaagacggaggaaagagaaatgcaaattttaggattgcctgggttacatggtgagaccctgttgaagaggagggaaggaaagggcaagctggcttgtgcctataatcctagcacttgaaaagctgagacagggttaggtcagtgttggttaaatagtgagttccaggctagcctgggctacagtataatacgttgtctcaaaaaaagtggggggagatttctcaatcacgatcactcaccatgggaaattcagatgcaagttgcttgaagggttttatgtgtggggaggttggggctgcatatcttgagggattcacttaataaacactcccttactgactggcagttgattgctcattgtatccatggaaacagtggaacattgcttccaactgactctatttttaaaaaatactatattttcactttaattcttctgctggcttcagagtatgaaatagtcactcttccagaacacagagagaagtaacatttgtcagccctgcttcattgtccagtttcccagccccaaaccttcagaatgtaagaaccctttcagtaaagaccatagttcccagcctgcccgaggagagtgctgagaccagagctctgctgtccatctgctgggtgtatacatcctgctggcagtccagcttcaggcatggctactcagcatttgcaataaccttccatcttctcatggccacagtcttggtccttgactttgctaatccttagacatctgtctggtttctgcctccaggctccagatagtatctgaaggtttcttgctttggccattcctgtgtttggtccctgactccttcccatggtggctgcttccacgagcttgggtcctggactgataaaggggaggaaagaaaaagaacacagcaccagtatccacccttcactgtttcctgacatcaggtgtgatgagatcagtcccctcgaaactttactgctgtgacttccccaccattagtgacagtaccctcaaaccatgaaccaaaatagaccctttgtcctctaagttgctatttggttatagcaatgaaaacagtaactcctacaacatttcactccaatgtacagacctatgacttaaagtcaccagaattagaaataatcaaagttgtatctcatattgttttcagattcaatttgataaattataataaatattcatcatattgttcttcatgtgctcatttataaaaaaattattgagcaatcactaacagtatttcaggataagtattcagaatacttgaattttaaaaaagaaagaatttcttgctcctgtatagaaatcagccatcaacactatactaaatgaggaaattgtatagtacattgaaagattataaatgaaccagaaaagagacagtagagaaatgaggagggtgtcacactaagtgtagagcagacagatgaatagtaattgagaagatgacagaacaaggactagaggaagacatgagggcagttacctgacagaagacggtcttcagatgctgatggactagaggagagaggcctattgaaggggaaaggctattactgggagaggtagtaatgtggggatgggtgtctgattgaccctggacaagctttttattttgatttccctaaatagggagccatggaggtgtttgaaccaaatagtgattgacccataaaaggccaccatgctgataatagactgaggtagtttcaaaacaaacttgtggctatatgctccccacatcccatggggttgaagtccgattgagtttgacgaggttgtagctaatctgaccaattgttaatcaagggagggagtgaagacccaagggctgggcacttagaacaggaagggtgcctttggattggggaagcttgctctacaatctcagtcttcctctgaagttggttttcttaaaagtagatctctcctttcttcacctcatggaaagatgtttttcagagaagaaatttaaggtttttagttttttcattatatataagatgttaaaccttagcatgcacccaaaaagtaagaccttgtggctaattcatattttttgagcatgcaccagatatgggtttgcatatctgttgactgtttttcctgcattcactcttctctttttgtctgtccaagttgtaatgaacagaatgatgttccaacctttgtgacaatcccctctcctgttctcttttgaatgcgtcaaaaaccttctccatctagaatttagacagtgaaatatgacacccatagtcccatggagccctgaaaacatctctcgtatcgttttccttcacctgtaacccaggaattctatgtatatttattgaacagaaatctgagacacattcatctagtagctgctgaattcaaattgccattctaggggctgagacatgggcacgggtgggtgtgccctttgcttaagagttggaaagaacatggctatttcattcctgccagaaccattctgtaggacctcattagaggcattcgtgagtgtttcccttgcagcagagccaggagatgactatgtcaggccatcacctctctgtccttccagcactcagtgaggaatgagccacacaaaaccctcctggttctagacacaaaatagctcggagccacttcccagtgctggagattttctctgcttactttcatcttgtaaaaccatgtttagaatttagacctgcaggagcatcttctatatttggaagacttgtgaaaaaaatcaaatatatacaaatctacaggcaaatagaatgaatccttcattttaccaaaagactgtgaccagtgacttgagaaggtaagatctaagtgtttaaagcttagaggcggccattaaatatgcggttgctctgcctcctttaggggtttaactgggtatctgtcaggagggaatggaaagcttagtgctgggatgcagtgagaacttctgtctgtgtctcttcagtgaagagacaacagcactgggactaaaaacacagaaactgaaggcagttcaccacatcatagataagcagagtggaaagcctcccttgcctgtcttcaaggacaccccaagaagaagaagaagaaccaagccgtggtactttgaatgtaattggtcctcataagctcatagggagtggcactgttaggaggtttggcttttgtcgaagtgggtgtggccttttgggggaagtgtggcactgtggaggtgggctttgaggtttcctatgctcaagctactcttagttcagtcaactttctgttgcctgtgggtcaagatgtaggactctttctccagcaccatgtctgccttcatgctgccatgtcctgccataaggataatagactaaatctctgaaactgtaagccttccaattaaatgtcttcctttataagagtttccatggttatgatgtctgttcacagcaatagaaaccctaagacatgagttttccacctctctctataaagacagtgcttgggatgagaatgcaagtttacatgccctttctattgcctttcattaaacacattttttgtgtgtaaatattcatgtatttatatgcatactggtgggtatgtcttgtgtttgtcagctttctgttactgtgataaacacctcagggaaaaaagtcagatgacaaagagaaaggtttattttggctcatgggtgtggagatgagaaagagagagagagagagagagagagagagagagagagagagagagagagagagagagagagagaggtatcttttaaaaatatatacatgtgcccaacagtggagtattgaaaggttttttaaaaaattatgtgaatttgtgtgcctgagtgtgtgtttgtacacttgaattcagtgctagaagagagtagtagattccctgaaactagaattacaggcagttatgagccacctcatgtgggtgccgggaactctgggcttttgcaagagtaatacaggtcatcatcaaaccctatttctatcccttcagtattcctttcagggatatatgctcaatgacaggaataattctcactaagccatactttctcaaggtcccaccaccttcttggtggtgctttgggccagtacgaatgtctgcaaatcacaacattacatgtagatataaatacatatgttaagtaataccttttctattaatcagctttctgagactgtgacaaataccagaggcagacaactcctagagaggaaaggtttgttttgactcaggtatttgagagttttagttcatggttaattgctttgttagtatcctgccaatacattatggtgggaatgtgagatcatgaagctgttcacctcaaagtgaccaggaagcaaagacagagacaagaagtggctgatgtcttaatatctggtacacactctgtgatttaactttcactaggctccagctcttcacatttgttaacctcccaatagtgtaataggatagaggagggcttcaacaaacataggggcttttggaaacacgatcccaactataaaactatattatatatattttctatttgttacctactttatctctttgtatatataacataaaagttctgatcaagataataactgtttatagaaaatatcttctagtgctagccctatttggaatgtagtgtcataatagattttaaaactgcttatttttttcaagttttacattaaaagtgcttttattcgttctttgagaattttatacgacgtgttttgatcataatacacccattcctcagctcctcccagatccacctctcttcccactcacctttcacacccaatcttgtatcccttttccttttcttctcttcaaggccaatttgtgttgctcaaacattcttatacgtctgtctttccattggagcatggctcttaaacagatcctttttctcctgggagctaagattgccaatagctcatcagcaatcaggtagcagggggcgctttgtatccaacacttctctccatgctgggatttagtctggcttggcttacacagaccctatgcactatgcaccaacttttgattgaaggagctgacatgactccaaaccaagaacatgtatctgaaaagctggaatggcattcctgtgatcccagaagcttgaaggttaaggcaggagaatcttgagttctgggctgtccttggctatatagagaggtgctgcctcaaaacaaccaaccaaccagtccaaaggtaagagactgcctcatttccaaggacagatagtgtcacagattagaacatggcttcttaaactgagccatgaccccatgtggggctgcttaactgactgtggggtcatgaaaaatttggcaacagcaaaaggtttctcagtgtagagtgactggaaatcaattccgaatcagatgtgtgttgtgaatccaaggtgttcctggcattgctggcccatcttgcatctgtggttctgagcacacacaaacactagctgctgagcatgcttaacaccacggggacagagactggaatactcgggctcagagtcctgttataaattgcagtgttttcactgttcatataaagttttctgccctcacagaaaaacaggggaagatgagcaatattttcctatcattatttctcaatatttatctttgaactatattatattaggatgtttaatttcaaaaatgtctggcatggctcaaagtagtcttttcccatttattactatgtatttatgtaaaacattgctatcagcttggtgatcataaaacataaacattgatcagatctaaaaaagacgatgaagatgctctgttccctggtgtcttcagctattcagccaggatttaattcctaatataaaaaactaacaatacatctatctcactggtatgtaagtttgcttccacatttaataaatggtagttatagatgttcatggatggtcttaaggaaagtttctttacgagtcattgtggggaaatgtttggtttgaacccttattttgtatacgtatataccctaggtgtcataacaacttcctgggtgaaagtgattgtggtgggacaccatgaaggagccctgggctagaaggtctggcacagggtgtggggggtataagcggtaaagcccatggggcctgctggtgggagtcatgctagctgctacctcagtcaggcatgccctttagcttccccagccctgtttaaaacctggaagccatgaccataccatggagattcatttgtcagaagcagcagaaggcagggattgcacaatcctggctgagggagaaagtgtatggcttcagagagcctgccttgctattctcttccccctcccctctctctctctctctctctctctgtgtgtgtgtgtgtgtgtgtgtgtgtgtgtgtgtgtctgtgtgtgtgtgtgtgtgtgtgtgtgtgtgtgtgtgtgtgtgtgtgtgtgtgtgtgtgtgtgtgtgtgtgtgtgtgtgtgtgtgttgtgtgtgtgtgtgtgtgtgtgtgtgtgtgtgtgtgtgtgtgtgtgtgtctgtgtgtgtgtgtgtgtgtgtgtgtgtgtgtgtgtgtgtgtgtctgtgtgtgtgtgtgtgtgtgtgtgtgtgtgtgtgtgtctgtgtgtgtgtgtgtgtgtgtctgtgtgtgtgtgtgtctgtgtgtgtgtgtgtgtgtttcaagttgaagttgtttaaaaggacgatggtgatgctgtgggcccttctgtagctgaggtcactgcactgcacttcacacagaatgctgtctctctctctggcacaggaagctgcagataacaggtgaaacatggagcttgcttgctggaggatgcgggtccttggactgtgaggttttagatatggcaggctacagatctggggcctcaatatggtggccaagtacttggcgacttcatcccccactgtacttgagatggagcccatgtgccctggcagccccactattgagtagtaggacaaattcagacctttgccatacagcttcagaattttgtttttcctgcaaggcagattcatactcagatgagggttagagcaagcagaaggaggagatgtgtactttatctttggcctgcatttgaaatcaactgaggctcatttacttttaggtgttgtggaatcttcaaaagaaattcatttattgtactaagtagacaagagtgacaacaatctacaggctcagcagttggcactgtagactttctttccagtcccttaagatttctttagacagataacaaatttgcatggtatgagacatccccctcatattttgaacgacctcagggaattagcagtgagctatgaaacaagggaccaggcaaagacaagagatcagtcagaaagggagaggtatcttcacactaaatatccttccaaattaagtctttgcccatggtcattcacacagggaatttattggcctccagcaattgtcccaagctgagaacttctgtaggctccttaggggaattatattgccaaaggctagaaggaagctataactgttaaatccataggattggccagtaagatgactccgtgagtaaaggggctatttcagtttttctgttgctgtgataaacactacaaccaaaagcaaattcaggagagagtttatttggcttatacttctagatcatggtctatcattgaaaaacatttggggaggaactgaaagaatgaaaaccaaaaatgtggttttgttcactggcttgttccctgtgacttatgcttagtcaactcttttagataacccagaactatctgcccaatggtagggctgctcgtagtggcttagccctctcatatcaatcaatgattcagattaatttccccataataattcattcttcatagaacaataatatctggtcaatgcctcaggttgaggctccatctttctacagaactattgggtgtttcaagttgacaataaaaaccaagcaagatagtgtttgccaccaaggttgacatcttgagtttgatccctggggcccccatggaggaaagagagaactgacttctgtatactggattctgacacccattcatgtattgtggcacacatatgttcccctctaactcatgtacacaaaataaacaaataaaagtataataaaataaagaacaaacctttaatggcatcctttactcaaaattgagaatagtaagaactggcccaagactatgtgttgaccccaaagcaaataattttgcacaatatctatttcatgtatggctatggatgacaacaggtcaggaagatgctctgggagcaggcttgaggatgtcagagttggtatcctagggatggcttctagggaggaagtacaggaatcctgagtttccctgaagtgcaatgccaggcattcactctgataccatctctaccctgtgctctccttcggaagagggatcctatcagcctctctgtgttactgaaatacactgggctgagtgacttcagaaagaaaaatttcactcacagtgctggcatcaagagctcatgtcatgtgatatgcaataagacaacacagagcatcacacactaggagactgaacattcatgtctatttcaatctttgcctgtattgtggtcctatctaaccctaatcctaaccacctgacaagaggcttgcttctaaacaccatggtaagactaaacttttactctattttattgagataggatatcacagagccaagactggcctttctaggtagctgaggttggcccttcttgaccatcctgtctccatatcccaagtgctctaccacacccggctccagtttctactactatgatgctttactgtggatattaaatttcaatacatggggtatactctgaaggcaaatctaaattaccacaggaattgctacacagcttatcctgctccattttaaaacaattaaacattgattgtactgggagggtatagaacatggctttagttaagcagttactagtgtatatgatgcaccactcatctaacgaaagggctcatcttagttacggttttattgctttattttttattgttttatttatttatggtgaagagacaccgtaaccaaggcaatgcttataaagaaagtatttaactgggggcttgcttacagtttctgagagttagtccatgaacattactctgggaggtagacaggcgtggagctggagtagtaggtaagaactgatccacaggcagaggctgagttagggagacagggtttggaacaggcttttgaaacctcaaagcccactcctagtaatacacttcctccagcaagcccacattgctaatcttcctaatccttctcaaacagtgccactccctggtggctaagaattcaaatatatgagtctgtggggctcattctcattcaaagcaccacaaggtggtaggtaccctttgtttctgaagcaattaaggcagcctttggagctactgtctttggagatatgtgttgggtgtgtatggaggtttgggaaatgaacatgtgtaaatggtctacccaatgactattctctccttgtctattgataaagagtttctaacttggtttgtggccacttaaccagttccctgttcagactttcttgccattaggaatggctaaacaaagcactctggttgagcagttatagatagggctcatagggactcacagacactgaagtggcaattacagagccggcatgggtctgctgtgggtcctctgaatatatgctgtgattgtttagcttgggatttttgtgggactcctaacaatgggagtgggggaggtctctgactctttcacctgctcttggcacgggattgcctcgtccagccttgatatgagggtttgtgcctagtcttattgcatcctgttatgccatgttcagttgatatacttgggagggattttcttttctgaagggaaatggaagagcagtggatgggggagagacaatgtacaggagcaactgggaggagaggagacagggaaggctgtagtcaggatgtattgtttgtgagaaggattaaaaaggaacaaaacaaaaaagagaagttataactagaaataaatggaagggtccttggagcttctgtttttataaaatgaatgcacaggtaaatgatagataaatagaaaaaaagaaagaatgaatgaaaggaagatagagagagagagatctgttatgataaatattttcgtcaaaagccgctgagccccactgccacgtgtgagctttacgccagccgcctgcccgagttaggcccaaatgaatacacagaaacttgtattaggtacaaagctgcttgaccaatgactaggacttctcatctgctagctcagtctcaattatcatacatctatatattttataagacttatcttatcagacgccttattggcgtccctccttgtcggtggctcacattgtgccgatggagcaggagctgaggggaaaagaaggaacttcccacttctcctcactcaaatatgagtctccttgctatgtcatttcctgcctggaccaccacttctctactacatctcccagaatcctctttgactcctagttccgtctaacttgctgtctcattggccaaacagtattttatttaacaatcaataagatatcaataaatgaaaatctataccagtgcaaagtattcattcctatatcatattccccttttctttctttaaaaagagactgactatgctcattatcatttataactgaacccatttaaatgaaaacaaacatttataaataatatttgggaatatgggcgtcgtttttttttaaactgcttcctgctgattgggggcgatgttcatataccatggggatcatgataaaacatagaaacctgaccaagtccttgtttttgtagtctgtaaggctgtatcgtctcagctttagggggtcttgcttggtcaaaccatattagtctggaaggaatcaacagcttttgattttctgtggaaatacaagtaaaacctttatttctaagtagcctgtccttagacttaaattttgaagtcaaagcatttttaagttgtataagttggtttaatttagcagcatttataataaaatgtattttagcagcagtaagtctttcctcggcaatcaaacaatttaaagacaactatatggcataaagtattcagattctctgtgtattttccaactttatgtagtttttttattactttatttttactttcttttgtttcttttttccctagacagggtttctctgtggaaatctgcctgcttctgcttccttctctcaaaagcctacatatatttttaaacgcagtgtaaacctttagaggtttttcttcatctggatctgtctttatcatctcagaagtgccgagtctaaactccagaagcaccgggacggcgtgagcatatggaagctgctccgatgccactcagtggctcgacagggcgggctgtggtagcaggtttccctctttctctggaaaccttgggggcatggggtcatcccgctcactgacaccattctgttacgataaatctttccgccaaaagccactgagctgcaccgccacatgtacgctttatgccagccgcctgcccgagttaggcccaaataaatacacagaaacttgtattaggtacaatgctgcttggccaaagaaaaggggaataggatataggaatgaatactttgcattggtatagattttcatttattgatatcttattgatggttaaataaaatactgtttggccaatgagacagcaagttgctatttgctcttcatctctcacctctcctctgtttttctggaattttgagtcagtacctgggggcagaggagtcacttggagaccattaagaagaagccacatgctaggaagaaagagcaggagctagaaggagcctggtttcacatgacttccccaggcatttgcaccagctcgggactgaatgtcacctctacagcccttgccagtgggaaaaaaggacttcttacttgtttggtcctctgaagctgttattatgtaaatgcatgcttgtgatttattaagtgtgatatataaaatacaagccgtggcttggttgctggtacactgtgggtcataagagtccttcaaaggtctatgtgttcaaggcttggacatcaaggtggtgcctgcttgaggaggtaaaatcctttaagaggtgggctcttctggcaagtctaggtcactatatgcacttaatgaggtaaaagtggttaattttattgtccacctgtcaccaatctagaattacctgggaatagtctcagggagcgattttctagattaggttgtctcattggtgtgtttatgagggactatcttttttatttttattttttttatttaaagtagaaacaagcttgttttacatgtcaatcccagttccctctcccttccctcctcccctgccccccaccaatcccctattccatcccctttctgcttcccagggagggtgagcccttcaacaggggatcttcaaagtctgtcatatcatttagagcagggcctagaccctcccccatgtgtatagcctgagagagtatccctttatgtggaacaggctcccaaagtctatttgtgtactagggataaatctgaaccactaccagaggacccatagattgcccaggcctcctggctgacactatgagggactaccttgatttcattaatagatgtgaggaaacacagcctagaggtgcatagcaccattgccttagggtcctggacagggcagataggaaaaagctagctgaacactaggcacaaacacattaattctcactttgttcttgactttgggtatgaatagctgcttcaggttcttgtcttgatttccccagaatgatggattacaacctctaattagaagccaaataaatcatttctcagttaaaattgtttctgtcagggtgtattaggctaacaacatgaaacaaaaccaagacaaggtcaccgaattcccttaaaggggatcctagtctccacggtttcctcttttgcttcctggccacagggtgaatatctttatacctcattgtattttgttgtcttgtcctgggaggttgccattctagactggaactttcaaaaccataagccagaaaatccttactctttgtaagatgattacctactagcaatgaaaatctgaccaacacagttgtcaagaggaatcagaggtcagagacgcgaggacagacacatgctcttagttgggagaaataagtagctgcagaaactgaattaaagaggccatgggacagttgagtcaagagggaggaaacaggacgttaactttatatcacaataaaaacaaaacaaaacaaaacaaaaaaacagagactgatactagggttcaagtttcaagctggggatcagagaagcaaagcagccagccactagctctcaccgctacctcagctcagaccaaagggggcgatcggcaaacttctccagacttcactgctcctcagattcactctgactgctatgctctcctcaatgtgactagggtctaactctcagatggaatgccttgaccttttatacctctcaaatcctgggattaaaggcctgagctctgacttactctctggtagcccagggtggtcttggactcaagagatccatctgcctttctcctgagtcctgagtaccaccaccacctgacttctatagataactagtgtgactggctgtgctttctgtactctcaggcaagctttaataaatcataaataatacgtcaccacattacctgatgaaggtggtggctctgagcaaattgaggaggcagaagaatgtgacttgccaggactagaacagtaggtgatgcaagcatactggttaagagataggtatatcagttgcttttctcattgtcataaccaaatatcagaaaagaagcagtgtaagggagaaggggaccattttggctcatggtttgaggacacaaaccatggtatggaagacatgacatgaggattgggacggaccttgcctgtggtggtgagagcataaggctggtttttcacatctctattgtccaagaagcaggggtacgggaagtggggccagaggtataaatgtcaagaccagtctaccagagagctactacttctaagctaggctccacctctccaaattcaataacgttcccaaacagagccatgagctagagcccaagtgttcaaaaacatgagcatgtgagagactagtcacattagaaacacaatgttgagtaaagccaaagaggggccaagagtgcacctctttgtgaagagtgtgcctcaaggtccactcttcatgggtatggtcagttcttcaaagggtcacttggttcaggctggagctcagaggtgaacaatgcccacatcttcttaactttctatgtggtgtgtgtgaattactttgtatctagttatattctgtgtcttctgctttcacaggacccacacaagaaccgttcctcagagaggtatggtgaattgaagtgaggagttgtctggacatgccagcttcttccgtctggtgaactggggtgaaactaggcttcaggaacaatcattcaagccttggaaactgcatacagatatacccattgggtagctttctttaaaaaattagctaactgaatttctgacaatgagatgtggtattagaaatagagtcccttgatctatagaggcatgactaaatcttcaagtgggaaagcaacagtgcactacttacctacataaaaattgaaatcagctcactggtctctctaatcttccctgatttcaagtcttgcattttaaagaaattacaaagaaagaaacactctcacacatagcaattttcccaggcttcaagtggacctaaatttggaatgcctgaaatcaaaagtactgataatggatttgctcaaatctagcagaattaatccatccttgctggaatgaataaaaatgaatgcaacatttagtttaagtagcatgtgctgggttttgtaattctctgtccctcgttccatcagctgtgtgaaaagcatcccatccttgtttccacccttttgctctttgttagccaggttcaccagagaaacaatctataaaaatactgaaacataaatctgaaggtattaatagaggtaagttatatatctgttataaatatagggaggggtgtgtgtgtgtgtgtgtgtgtgtgtgagagagagagagagagagagagagagagagagagagagagaggaggggggaagagagaagaccatgtacatagctctgcttgtatgtcctattcagaaatccagctgactgaattgggtcttctcatatcatggataaacagcttgttttagtgagtctcctaggttaaatgttaattctcatccaatacaccctcacagatacaatttgagttttgtcaaatatctgggcactgcatggcccagtcaagttgatatgcaaaatcaatcacagcctaaccgaaattacaaagactccagttacaacctaagctcctttctgctcccccattggcctacacctaccccttctttctggtgccctctctgcctgaaagtcctgggtttacgtcatgtatgttcccttatcctgtcttgttcccccttctctggtgcagacctcgtccccatctctcacaacccttttctacttctaagagcttattaggtgaatggatcagacaaccaggagcgtatctgtatgaagctgtgtttttccatattccagtagcaggggtggctttgcctgggtgaagctcagcatagttcaggtaggagttgaagaatctgctggggtggggtggggttgtgttggatgatgctgaggatcaacaggaaagcagagcccaggtattatgtcagcccctcaggaagttgagtcatttcagagctcagttggttcatctgagaggtgggaatgttaagttggcttggggagatgatgactgcagagctttacccattcagaaataagccttgtcagtcagatgggggttgttttattctcctccctctctctgtgtgtgttggaatagttgactttacctatgccttctttcaaacattatttgggcgcaggtggtctggtgatcatggccagtacttatttcctcaccactgataatctgactttgttttcctcttgggaatatttggaagtctgggcaatttggggctgctgtttgtaaccatgttggctggctattgcatatacagttttccacagtccccacctgtttattattgcttattactttctattctcttattttctcgtcttgcctccttcaccttttcttccattccatttaacataaatccctgctgtatttcaagcttcttggagcttgttgtgcagcttaatctatacctcattcttacagtcttcctccaagaattgaggttactggtgtgtgccaccatatccagctaggtaagttagatgtgtttgatttcaatgtcttgtctagttgactacataaccagaaatttgcaatgactgatgttttctccatatgtggtcagttctaccattgatatagaatgatctcaaagcaagcattggggctattgacagaaaaaaagataagtattgtgttattgctctctcatttgaaaattttagtcaaagcctctatttctaatagtcgagggagcttcagatgaggaatatttgggaacctcacaccacacatatgtcttgtgtattgatagacacactacttgcccagagtctggttctcagcttggcaggtttaggcagaatgtttgcagcagggaacagactacagattctaactccatgtaagcctgttggaaactggcttctactgactccaacttccaaggtagtagatcctagtgaggagatttatacccaaggtgtttatggaagagttctctgagaacttttgtggaagtgaagaaagtaggagggaggaggttaaatgtaataaaattacaaatatgagtttcagttgaggctaaaggaagccccagagcagtggctattcctttacatgtgtgggacaaggtttcctggtccaagcactttatgtgtataatctccacagttaaaacactctattgcaaaaaagaaaactgaagccgacctatgaaatgtttttaccccagtatcttacaagtttttatgtggtaggattgggatgcaaatcctaaattatgattccaggagaaagtatttgttactgtcattctatgtaggtatgccaaaatgggtcatgaaacaatttctgtttctaagcaagaagcaaaataggtttattctgtgtggtatgagattactagaattcttctttaagatagaggtgtgtgtgtgtgtgtgtgtgtgtgtgtgtgtgtgtgtgtgtgagagagagagagagagagagagagagagagagagagagagagagacagagacagagacagagacagaaacatacacacacacacacacacagagagagagagagagagagagagagagagagagagagagagaatgtatgtggattgcatgcatgtggattctatgtgtgcgggaacctgcagaggtcagaggatggtgttggatcttttgaagccagagttacaagcagttgttagcctcctgaagtctgtgctgggaattgaactggggtcctcaggttctttactgtagagacatctcttcatcccatatcagaaattttgtattcaaacactctcaaatggaaataaagccttttcttacaatttttcataaatgatttacatcgctctcctatgtatatacttaagcctgtggcatatgcattaccaatgacgtttcatctttagatgtctttcctccatttgaaagatgaatattctttgtaagctctcaattcaatttattcatttcaccacttctatgcaaggattaatgaacttccgaacaatcggcggtatgcaatgtatcaggcattgttgtgtgacaggaataccgaggcaagcacgacacatcatctttcaagagctctgagttcggaggggactcaagcgaataaacaaataattaaagcctaattgtatgattgtgggctttcttcatctaaactagaattctgacagcctgcatagtgatacacaggcctctgcacttggaggactaaagccagaacctcctgagttcaaagtcgacctaaaactaatagatgtacactgcagtatatggtgtgtgtgtgtgtgtgtgtgtgtgtgtgtgtgtgtgtgtgtgtgtgtgtgtttggaaaacatgatttcaatgtggcccaaaaaggggcggaaagataaagtgaacagataggataaaaccagatcacaatagcctgtattctcttgaactgtgagctaaagcagaccctccccactcacgttgcttctgctaagtattttatcacagcaacaggagaaataactaagacactcatcattttttttaacagaatttaatcagtcttggaggatggggctcacacagcccagtctactcttgaaagacctatctcttactactgtgaccctacaattacacttccacacaagtgtttgaggagacagcctccagctgcagcatctgaaaaaaggcaggggcagggatatcatcaggagttctcagggcaggagactgactttgcttgcttgctttgttgttgttccatctcccatggagaagaactgaggacattctatgaagacaggtagacatcacggagggcatgctgttacgagattctggaaggattccatggagctagaacaaagaagacaggagacatggaattgaaagactagcaagagggaacagctaactagttctgagacacatctagagatctgaatgagagtcactagtgcgaggatttcccagaccatggaaaccacagtctctgtgagagtcatattcctaaaacaaatgttacccacacagccttgtcagaatgttaacaaatgaggggaactttccaccctagaatgtcatggaagcagcttagtatggttgtcctaagccctgggccttcactgccatgttttccttttgtgcttgacatggtacagggacgagatacaaaggttctgaaagaagtccagagtagctagagctagcactgttggtcacaaaggttgaaatgagagtccttcaagacctgtgcttcaagaagcaagctgatgtggccagaagaaaagcaggagtgacaattagtcactgaggaatgatcagactttggaagggaggtgaaaaatctgtttacactttggagccagcacaaggggaatggtttccaatccagcaggacatggagaagataaaagaatccatctgatgcagatgctttctttataaactgtgggtaatgcagccatggacttgcattgcacgtgtgctagggatctttctagctgaagttgtctcataaacttcatggtttctatgaggaaaaattaaaacttctgttacctttggattacattctaccatcacatgcacacagagagactttcatatagaacacatgcacaacagacacaggtgtaaacataacacatgcatagcatacacacttaccgcacaatacatacatacagattcttatactcgtatacttacataacacacccagaagacacacatagagttcatgcacacagcatacacaacacacacagacactcacaaaggcacatagataacacacacatagcaaatacacagtgcatacacacaacatatgcagcacacaatacaaccaaaacacatacaacacatatcacacacagtacacatagcacctacaatatccctaagtagattctgacaaaggctccctggcttacagctagctgcttagtcaacatttactcccccataacccttaatgagaactcaattttgtgtggaatttcactgtgctagctaaaagactacatttcccaggattgcttgtaagtacctgccttagagtcgaagggtctgactttcagggtagttccttgtgctcccagtttatttcctgcttaagccccgcccccaagtcctgtctatagtgtagaatcatggctagcctggttattactctgttatagactgagctagatcatgactttcttccttttggctctctaaatgaaaacaagaaaaaaatgattcctacagtaactttagtcctaagagaaactgaaaatgatgcactgaacggcacattcccacttctacctccctagcttggtgagtaagaggccatggtgacaaacagggcattccctctagaggagcgaggctaaaagcaaagatgatgcacccatttgccaacattccttcttgcccgcctgtctccttccctccctctctttctctctccttacctcactttcttcctgcttccctctttctctccatcctatttttatttatgtatttgttctttaagacatatagcctaggctggtctcaaactcatggatctcctgtctctgcttcctaaatggtgaggttacagatgccccacccagatttaaaaacttactatcttttaaactcggaagtgggattgtagccactcccaagaaggaagtcaatagtttcccaggacaattttgtcctcaggactatctttgtgtataccttcctcggatcacatgcagctagtttatgttttatcttcaaaggagtttgaaacaagcaattaattaactaaattaactctaagcccacacgaagagaccttccctatagaaccacaaagccatataaatctgtatcattccatagcgcttcaagtcatctgcagattcaactgtccactgtcaaatactgtgtagttaggctgatgatggtggcatctgtcctgaacacctctagactgtttccattgacacattgaaacagctatttatgaaacatcaagttatagtgggtgttcttagtgatctacagatgatttcaattacacgggaaaacattcagattttatacaaacagtatggtttattatgtgcaggccttgagcagcagggcattttggaacccgaagggggcgtctgagacatatatgctgttccttcttgtggtcattatttctaaataagcttcccaaagactacttaacaatactcctgtgttttattaataaactgtcaacagcaccaaactacagacctgaatctaactcccctctcatggtccaattcacagggaatgtttaaagcagatacatgcattccccttgcccatgtaagttaaaaatcaagaaaatgaaagcagaagctattaattctttttaaagatatggtcttaatctgtagtacaagctagccttaaattcatgactatttccatacctcagtttctaagcctaggaattgtatgtatgagccaccatccctggctaaaagttgcttagaattcaaatgtgtcacctcacattgaagtgagagaaattacccaccaagtggttacttctagagattgggtaagtgttctctcctctgccatagcatttttctctccctggaaaaacaatttagaagtcattgctattttgatgcagagttgaataattctccagggtggtcaccaagttactaggtccaaagtgtgccatctggggtaattctgctactcttcagtgctttctatatgccttaattttaaattgggtacaagcttatgttactttaaaaaagatttattttaatttgggtgtgtgtgtgtgtgttcttgtggaggttagaagtacatcttgaatcctgtggagttggagtaacaggcagtagtgagcgactagatgtgggtgttggatcctttgcagagcagtactttcttgctcttactgtggagccatctctcaaactccatgaactcgtgtctagacataatgcaggtcctagagtgagcgctgtcgcctccatctcacaccatgtggctgtggctcctcttatctgtggaactttgtttaaacctttggagctcactgcctggagaatatcctttttctcattctccacattagttttgcactggagactccctcaagagctgttgtggatgattgcaaagcaatagaacatggtgaaaattattcctttagctgtcttgcttcaatactggaaagtctatgtagcagtttctgctttgctctttcctgcgggcatagtcacagcttacagtttccttctggaacagttgagaaacatgtgggtctcgacctcttctatggggtttgcatattagatattctgcatataagatattgacattatgagtcataacagtagctgaattatagttatgaagtaactacaaaataattttatggttggggatcaccacaacatgaggaactatatctaaatgtcacagcattaggaaggttgagaaccactattatagaacgaatccactgtctgtgacttcaagtttacagttgccatccacccttatctttccttaaactgtcagctcttgctctcttcacagggatgtctgagtgtcttgatcaactatacctctatagtaggaaattaccaatatggagccaagtagaaatataagggtatttaatagggaaaagccttacttacagagcgacctagccagccggcacggcagcagtctgtccaacaagtacaaaagtaaaaccaaaagagagacgcagtcccctcaaagtctcactctacgttaccctcgcaagcgtggtcaggcacatctgtagccagcccctaagtaggcgtggccacagcttcccctacaatacctccctgcaatcatccagctgcctcctgaacaggtgcaggtaagctgtcttgtcaaggctattcatctgctatttgctcatatccaagagaacagagtggaatttagacagtgggtctagcactttccacctagtattaataatttaaaggtcgattgtccctactgtcttcagctaatctaacacacagatgccttcagatttgaaagcagcaagttttttttttctctacacaccaatgtctacaaagtatatgcatggaaaaggtttggataatctaaaatagaacttctgtcccatctacaactgcctggaaaaacccatgccttctagttgaaggtcaagcttgttttctggtaccctggaccactgtgtactggcctggcattggcagagtactctgtactcaaagctctacaaaagcatggcttatcacagatgggactgccacagctgatgtgagccaccaaggggaggtatcccacagaactgtgcctgaggttcaaagccacggaccatggaaggacagataaagcctggagaaacaggcacatgggtcaggaaggaagactccaggtttcagggtcagggccatggctgtctgcttacttaactccaaataggctagtggctatgatgcccctgcagttccctcatctgaattgctaagggcactcctgtgacaatacacagcaaggggcagaacacatgcctgggttctgctatggctagaacccaaagcaaaaagaaagaagggattgatctacatgtctactcatacctccaagtcaccagttagatgtaagagggctttgtggagaagcagggcgtgttacctgtcatagaaggacacctgggttcagagacgccagtgcaaaagatgcatgtagcacaatgtgacaatattacttagttcatgagatttgattcataggttaagtatttgaactttgagcataggctggacagctccatcctctgctcatggatgtctccaagatgttgctagctacctcctctattgtatatttcacttccctttgttcttagtatacctgttactgtacctgtttacaacctgtctaactcttccacctggcacagactatggctttttccattttaagtctccgaatccctagcttatggctatatgacccaagactaaaattcaaaatatatttatagaactttgctgaaccaaactgtgtcttagggtgaaattcatgattccttctattgtaaaacaattgttgcattaaaaatcagcctctaatgtaggagcctggtaacctggggagtcaataattctagaggaggtggaggatactattttttgcttagggtatcttgtgcaattttaataggtttgtgttatccctgcaggacattatcatgctagtagcaaaaatggcctttaccaaatgtattagagcctggggactcatctcccagttcttcacttgattttagccagaatggtgaggcaatctttctctcaattctagtatccaaggttgcacagttgcatatacatcagcttatttcctgtcttatgtttgttcttccctttgtaagaaaaaaactgttacaactgaggctgacacagttttatgtaaatacatttatttttccatttgaatatattgtgtttctttctctctttttgcttctttttatgtatatgggtatgtgtgtatgtgtgcatgcatgtgtgcatgcctgtttgtgagtgtgtgtgtgtgtgcgtatgtgtgtgtgtgtctgtgtgtgtatgtgtgtgtctctgtgtgtgagtgtgcatgtgtgtgtgtgtgtgtgtgtatgtgtgtgtctctgtgtgtgagtgtgcatgtgtgtgcgtgtgtgtgtgtgtgtgtgtgtgtgtgtgtgtgtgtgtatgtgtatgtgtgtgtaggtgcatatatacatgtggagacctgaagttgacgacaggaaacttaccctttgtagcagggtctctcaatcaaactcagggctcaacagtatggctaatctcatgagccactgtgcttggggtttccccagtcttcattttccaaggctgggattactggagggtcattatacccacatgggatttacatgggttttgggaatctgaaccccagtcttcttgcttgcaagctagagctttaactgctgagccacatccccagctcttcatgacattttctcttaatgaaggtatttggattcagagtcatggctgggagttcacatcatagatgtcaacattggtcatttgagtgcttgcctaggctatatccaagatggcttatgtgtctggaagatgatactggctgtaggtagataggtgctcatctcaatggaactgtcttctctctatgccagtgccacagagtagtccattttcatcagtctggctggctttcctcagcgagaatctcaggagcaaaaggtggacctgcactcttgtttctgacatggaagttacagaaccatggaaactagtttttattttgccttttattggcacacattggcaattatcatcagcccaatccagggtgatgagagaatgatctcatccccaaatgaaaggaaagtcaacaggcttgttcacaagtaccttgtttatgtgccaggctctgacattgtggacctggatgacactgaacttggcacagtcacccttctgtctcagccccctagggctaggttaacaagcatcctaggttaacaagcatccattactgtactcagctttgtagatgagtcctgaaactctgatgtgacctctgcctaaagttttactgcgttaccacctatctcccttcatgggcaacctatgtcttttaaacgttattcttttcttaattgataaattatccacttgtcaactaactcagtgagcaatgacaaattagtacactgtttctctatcaagtaaaaatatttttattttgtagaaaacttgactatcttgaaatagacttgacttttttaagagcaagtgttacaaagaatatttactttaagaaaaacaagattattggtggcactgaaatcacagaatatctgtgtctaacagcatagagatggattgaaatatgaggaccatgtcctaaggatacagattcctatggagcaaggtcctgaaatatcaaggtcaacccaaccactgagaaacttgggctaagtaatctatcagttattttggtggagccacggacaacttcagaaattactgtttcagtcactcatgaaatttcatccctacacatattttaacttgaaaacaatatgctgtgtgggacttttcagaaatctacagagtgggacccagtagaagaaaatgacaatgctccaatcttttgtctagtgcttttaaggtacttggtggtcaaccatagagacttaaagtgagaatccctctaggaactgagacaataggcaagattccacttcagagagtgcaaaaggaggttttgtagtttactaaaggttgtctacagattagcatttgagacaatgtatcagactaaatatatttaaaaaaaaatctgaccttgagcttaatccttgatattgcacaaataaaaattttaaaatctcatggacaaaaacaaatagcaatattaaaggagaaacaatgtaactaaaatatttaaattatagtaaaaattataaaccaacattaaaacttctgtgactgatattttgaatatactaccatcccagtgtaatctcttataactgcttcaagctctacttttcctacagtttgctacttttctaactaactacaagtgggttttatctgttttataattctatatattcagattatgtgacagtgtgagtctaactgtgcctggcttctttcggtgatttatttcatgctgtgtgcctcatggtttatccatcttaactgttgaaacatgtaataattatcttttcagaattataaaaaagtgcttgtgatacacctcttatgaaacaaggagcgttactaatatatagttctggacgttcccaggcatgatagcttcacaaagttagttctgatcaggacctttgtgtatagtaggtggtaggtggcaaaggatggttatgttgttggggcacacagtcacacctgaacaaagagtgaagacaagggtcaaatccaggccttcattataaccccttgcaagaagttccaaggactcctctgagacccaatctctagttgatgatcttgaggatcaagttcccagcacagaaatctctaggaggtccaaggcactttcaagtcacagcagtaaataaatgcacatttccatttaggacagtgattgtcagccagggatgacttttcaacaccagtggatatctggcaaggctgagaaacattactatgacctacgaggtactgcgagaggccagcatattgcttaccaccctacaaggcacagggaatcccacaatacaaaattacatgatctaatgtgtcaatttgagcaaaagaattctggtttaggatttttatagtgatagcaagacaaacagtgggatgtgtgttgtggtggatttttcaggcacttctcttgggtgattattaagaaatatattccaataggatggttcagctttagaatgtataaccaaacagcttcccaaaatattttacccccttccgttttcagtactagcatctgagagccatggttgttctgtgccctcagcagcatacaaatcccacaggcttttcagtcttggcagttgtggtgtctgggtggccatgtttctttttttttcttttaatttccataatgaccactctttttgatcactgtcattgattatgtcccctcttatggcatcccttcttttttgccactttttaaattgagttgtctgttgcttgtttattcatttgaacatgtttttgtaaatttttgttcacatatctatatccagtagacctgattcttccttttcaaaaccagcatggtccatccagaggcaacctgaagttgcgaagtcaaatccagaggtcaggagcaaaccagcagctgagtttccccattctggtcccaccctggacaaacatcctgtgagtgtgctctgcgtttactctgcctgccccatacaactgagaagccacttggccactgtcaaaggccaactcagtaatttatgcttgaagtccagaatcaccgctcttccaaggatttcttaataagtgatctgctctggctcagggtttgggataccataaacttgcaggggtgttttgaagatgatttggattggtcattggagggaaaagttttgtgtttccagaagagatctacagaaatcaactgtgttcacagcttttaaggaagaaagacagtagtaatatttggaggaactggggaccatgatcaccttgcctgtgtgcaatgttcatgcatcccccacacatgtaaagcctctacttaccttatgactttctccaagtatcatttagtgtttttaaaatgaagaacccaagcttgttcacctcaaatgcttagatatcatgagataatgttgagtatgtttgctgtacttacagccccatgaagccctttatatgtatattaggtttttgcatgtgaaattatcagatctattttataggtataaaaaattgcacatattcagtttagcatttttctctagcatgctctgaaacaaaaattcacattcagatcttttcagttcaaaaactgggtttcactcatggctgtcaacaggctaccatggattcagggagagagtgggccaaaatgcctgtcccatcccctctgaacttgtcaccatagatagattctgggaaatgggtgagtcaccattgtcagtgtatgcatactgctgagcccattgggtcttaaaaaaaagcaaatacacgtgaatatgaaaaagggaattgtagggaggagagaggctgagaacggtgagagggagacaagggagggtggggatgagagccatcagaatacattgaatacatgtgtgaaaatgtcaaagaacacatttaataaatgaaaaaaaatctgctttaactcagaagtcccactgtctctttctgatggtagtttcagtgcaaacactatgcatttcctgttgataccacatggcacaatttgaaggctatggtgaagactcgtagcctctcactgtgtgtttgcattgatgatggtgatgacgatgaagaggatgagaaggaagatgaagattaggatgagtacatgagtcaccaaggctggatccttgcaccaaataaaatagggaaacctttgggtaaaaaaatgtcattcaccaggacaggaacagatggccccagctccaaaggagctgggcaaacacagctcagaggctggggcttgctcctaagcatacagtgggctaataaaagaaaacaaacatctagtaacccatttcaaacgagatagcaagagaaagagctgtagccataataatagggttcctagccagcccggaggacagaaaggaaaccttgtgtgtagcatggtggttacagcccttttattcatcttgaaaatgttaaatctgtttccttactggtgattcactaaaggcaaagggccatgggaattggggccggatatactcacatttaaaagaagacttcactgtgtgtttttaaagtttggatgatctctgaggctcaatttcctcacctctaagacgacatggataaaagcctcccttccagggaatactaaaggagattttctggaactggctctctgacaaacaggctctatgacaaacaaggtgagatgcgatttgcactgtgctattctcagagtcaccacctttggggaggggagccaacaagagctcctgagtagctgcaacagaaacctcatcagctgtcgtactctggagctggaagaccaagcagaggtctgcctctggcgggggtgaagcctgtgtattctttatgggaatgtggctgcttcccgtggattagccctgtacaacatgatggagtgcttctgtcagaaaggtgtgtctgagggatgcgtcagagtggggacactcaaactcatgatttcctagacaccccttcaccctgagagagccttggacgttgccttaggaggctatgcttggactcgacgaacctgctgcttttggactatgcttcactccgcctgcattttaggtgccagagccacccttctttgttggatttcccagtgaagttctgccacagaattcagagactgaacatctaagagcttctgaatgtaatctctaaatgtgggtctggcctggggtgaatggcacaaaacttgccaatggccagccacacgctgatgttttaaagttttgtacacacacacacacacacacacacacacacacacacacacacacacacacacacattaaaaatatatgtgggctacatgatagattcatactcctttataaaagccctagttttgaattgctagcttttctgttgcacatttgattgatttgtttcttcctttttaaaaattatttatttatttatttgtattttatgtacatgggtattttgcctgcatatatgtctgtgtgaaggtattggatcccctggaacaggagttatagaaggttgtgagttgccatgtggattctgggaattgaacccaggttctctggaagagcagccagtgctcttaaccactaatcaacctttccagcccgatttggactttgtatttattactcatatgaagagcatccctttgcttctttctggcttttgggagagtttgtggagacttctactgtactagttgctttgttgctaggaccatacccaacaaaagcaattttagcaatgacaagttcactttggctcacagtattaagttacagtgcatcatgagatggaaagtatggtcacaggaccatgaggcaactggtcacattgtgtccacagacaggaagtaaagggagatgaatgctagtattcaatgtactttctttcttttatgcagtcgaagcaatgtgtcttttgtacttttattgccatcctggctaacagcctattaactccattggtgtttttaaagacacagattttgcttttttcccccaataattttctgtgtcaattcactatgctttatttatgtgatttcttcagttctgcccactttacatttaatttgcacttccttttattattacctaaaatggcccctgaggtaattattttaggttttttctttttaaaaataattatttatgaaacagctgacctgaacatcggggaactcttgctccccagactgatagctgggataccagcatgggactgatccagaccccaggaacatgggtttcagtgaggaaacctcagaaatctacgggacctcctgtagtatagttcagtacttatccctagcataggtgtggactttgggagcccattccacatagagggatactccctgagccaagacacacgggggtgggcctaggccctatcccaaaggatatgatagactctgacgacaccctatggaaggccttaccatccagggggagcagaaaggacatgtgacaggtagggttttagttggggggtggtggtaggggaggacgggagggagaagggaactgggattgtcatgtaaaacaatcttgtttctaattcaaattaaaaaatctgagaaaaaagaatcatgtaaaaaataattatttatattattattttttaaaaattatgtgtacgtgtgtgtgtggggggtgggtggggggggtgggtgggtggtgggtgcaggtgccctcagaggccagaagaggacatcagatcctctggaactcattataggcagtcgtgaatccccagacagggatgctgagaactgaacttaagtccctctgctagagaagtgtgcactcttcaccagggaggtatttgatgggggaatgcccttctgtatatatgtttctcttattggttgatgaataaatcactgattggccagtcaggaagataggcggggtgaggagacaaagaattctgggaagtagaggcagataggagtctccatgaagctggcaaagaagtagcaggttcggatccttctctggtaagccaagaccgtgtggaaacacatagattaatagaaatgggttaataattaagacagagctagccaataggaagcccaagtcaccggccaacagtttcataattaatatagcgtctgtgcatctatttggggctcaaaggtggcaggaccctgaagggccagaaaacttatgcttacagctatttcttcagccagtagataacattctctaatgtacataatgaatgctataaatttccctctgaacactgtatttgctatagcccacatattcctctgagctgtattttaatttttacttgtttaaaatattttcaattttcttcctagaacttttctttgatttataaataagttgattcacaaatattttgggaatttccaaatttctgttattgattttcactatggtctgtaagaatattttgtgtgatactttgtcttctttccaacgcggccaggtttacttttagtgctcaggatgtcttctctctttgtggatgttgtacgtgaacatgagaagattgtgctctctgctattgttttatgaaagtttctgtcatttagatacagttgactggtaagtatttttattccagttggatcagctagttactgtagagggttactaaagtctcctagtgtaacactggaagtattctttgtgattattactttttgtggatagcttgcttgtttgtaatggcaaatttccttgcttaaaaatccttgtctaaaattaataattaatatgattatcccagttatatttttctaccctttacttttgtgtgtaaaatatttgtgtgtgtgtatgtgtgtgtgtgtgtgtgtgtgtgagagagagagagagagagagagagagagagatacagagacagagagacacagagataaagagcagagagacagagacagagacagagactaactcatgcattttagaatggtcttaatctctctatgtatccctgcctgctttatgtaggtgctggagatcaagcccaggacatcaccaagttaggcaagtattctgtcagctgagctagatccccatcctcatccttttacttttactccatctatataattacatggtaattggacttcttgtaggacatatttagctgggtctttctctaacccattctgatagtctttatttttcaatctgttctgatagtctgtagtggtgggcatcaaacccattcacgttaagcctgtactctaccactaaggcccctgaaagtctttgaattggtatatgtagaacagttatgtttcaggacattgtgtatgtagtcagagcaaggtctcccatctttgtaactgtattcattgtccttatttttgttattttttgtcttccattctcatgccgtccgtttttagtttagtattttaagtgattcaatttttttcttttcttttagtgtatcattataattctcttcagattgccaccattggctgctttgcaatgtgcaatttcattttacatctatctaagtgcactttattttgtgtaagactgttgattgactgtagatagggatgaccttgaactcccgatcttcttctgagatctaccagtgactgaactgtagcaaagaccatgatagcacactttcaagaaacattggaccacttccctaatatcccaagtgtgtcccagaattctacttcccatgccttataatattgcaaccttataatttacttacctcatgagctacagtcatcattgttgctattattgtcagcagactgctaatggtcacttcagttaagaatatcaaaatgaaaggactttccttaacctgcatttgcttccttttcagcacacttctctttatggaaacccgagtgtctggtttatagaattttattttttatttaatgatttctttcactattttctgcaagacaggtatactagtgaatatttccctcattgtatgaaaaaatccttatttctctcactttgaagaatcattttgctgcataaagaattctaggttggaggatttttattatcattatatacttgaagatgtctcagtagagtctcttctctcctacacagctttcaaagaagaaatccaatatacttatatatttgttttattttattgtcataatatatatatatatatatatatatatatatatatatatattgtgtgtgtgtgtgtgtgtgtgtgtgtgtgtgtgtgtgtgtgtaagccacatggatgcaatagtatctgagaccagaagattccctggatctggagctacaggtggtggtgagctgctctactcggatactggggaccaagcttgggtcctctgaaagagcaacatccactcctcatcgctgagccatctctccagaccctgaaaaagacatctttatctatagacacactctttacttaaagtgcactattttcttttaaaaacattaacatagctatactacctttccttttgctactgtttctatggaaaagaccttcccattttgaatcctgtcattctttgcgctttgtttttgtttctggaggtaggctcttgctttgtaatacaaaactggcttcaaacacatgattctcctattagcctccagttactgggttcacaattgtggaacattttcctgttgtatcatttatttttgagagttttgtttttaatcaggtatagagttctagcttggtggttgatcggtaagttgatatctttgattagttttggaaacctctcacatatctttgcataaatggcttaaaatcccatgcttgtagtctcagtgttcctgcttgattgttttgttgagggtaccttccagttcaggggttttattttcttctgcatcaagattgttagttagtgatggtggcatatgcctgaaatgttagcactcagaagtgaaggcataaggttgccatggttttcaagccatgtagtcagacctcatttcaaaatcccaagcctgggcatatttaaagcctagcatgttcatggcccaatggttaattcttatcacttcagaaagatataagagacaggaaggaggaataggaggaaggaagaaggaagggaggaaagaaagaaaggatacaggaaggaagcgaaggatgaggaagaaatttctgttagcattcatgcttagtttctagtttcagttgttatactatgacagatttatattttttaagtaaattacaattctctgaccaaagacatcattattactccactttctccgtctttgccagtatcatcatgtccatggagacttgaaaagttttgtttgttaacttatgatgctgttttgggggtctgtttcctgttgtcctttctgttggcttatagtcatatgttcctatttttttaaaggtggactttgtacatagacaaaagttagaacctgtagctcttacatcatagcgagtcatcacactttctcttctgggcatgtagaatgaggcttgggatgatacttcagagtctgtgcagatacagactgcttttatttatttattttaatatgtcttttttattgagtaatttttttttatcccacaaccttgtatttgtgttgtttttgaaaggctccgagtaactgaaggtttctttcccacctgccagtttccaaataaccactccaaggcttaatattaatcataaactgtttggcctattagctcaggcttattattattaaccaggtcttacaacttaaattaacctgtttctattattctatattttaccatgaggctcatggctgattacttcacattttgctttcctgaaggctgctgaggtctccctcactccatctaccccccatgccgcccccatctctattctgcctggctattggccaaatcagcttctttattgaccattggtaaataaacacaccttttgttcatctcagaacccaagatataggatgttagtgctttcttctgagacctggacatatttactgcggcatccctgaccagttctaaattctaattctttcacagtgagattgaagaaagtatatttcactggctttcgcagacccagggtcatggctgaggggtagggacatttggatgactatgtgagagttacagcctcccaagtcattttgccccagaacaggaagttcctagaggggaaatggctctccagcacttcagctcgccatctgagcctctctttggaatcttgactctttgtgtatcttagtctgtctctaggctcctgtaagtgtttcacagtctcttctggcttctctcctccagctctgacatggtcggggaatactcaaatactcaagtgaggaatacaggcagacttcacaaatgccttctgtttcagagtggcagcaaactctacataatcttcttgcagtttttcactgtccataatgtgtcctttttcatccttttgctttgacaattttgtgggatttttaaaataaatatcctatacttttattggaagtgtaagaactacagccctgctataagttatttcctcctacaaagccatagagatccaggttgccatcattggaagaaaaatattgatttagaatggcattatcaaagcctttttgtttgtttgttttgtttttctagaccaggtgtctttgtagctttggagcctgttctggaactcgctctgtagactaggctggcctcaaactcacaacctttgcttttcttaaggatctataaatcacaaatatattgtaacttgagcatgaatttaacatggtgaacttaaaaacaaaagaaaactcatttaagatctcaaaccccaaatccagggaaaaactgttccaagcaaaaagagaaatggtgaggtaaaatgtggactatattaaaatattttgaattgtgttaacacaaaacgaaggacatgctcgtctaatgacctcattctttctacttagattgtgaattagccttaaagacagcaataattgtcagggatggcttctcagacctgtaatctcaaaatctgagagataaagagactcaagttcaaaggcccatctggtccttttagtgagatttgtgtcagaaacaaaccaacaacaaaccaaaaacaaaccaacaacaaaatttcattttgataataattgtgatttgaaggcattcaacatcttgggactgattctaggaaatgtaccataagatatcacaaaggatcagacagtaaatcctaatgacttgatattgatgagcccatgtgacttagaagggggcagtagaatatttctccaaagaagtaatgaatgagtttctgaagaatgctccctgaaatcccacggtcttctattgatgacatttccttgagtgcttgtgtgataaagagctttcatggtgaacagtgcttcagtttgcatgagtgtcccttagaggcccaagtggtaaagacttaggtgaagtgtttatctaactattctttatcaataaaaactcgggagtcagatatcagggtaagaacttgaatgttcacagaaacggcagagaagtgaccaggtacccccccccccctcttcttcctccatctaaaatggctgaaaatctttctaagctcctccctactatttcctgcgtctctctaaatgtcctcagtcctctcagacctctatggttaattttgatcagctagtagctagctccagcctctgattcaaaagtaaaacttattggcagtctcggggagtgtcagagtgtgatcaaaatatcctacaacacttagttgacagtctaggatgctatcaggcggtgaggacacctttaagaggtgggtcaaagtaggaaagtaaagttaagttagtgggacagtccttggaggaggtattggacctcactccattcctgttattgtgtttccttcccagcctggcatgagctgaacaactttctctgacactcctcccacactctgcccaccacaaacaccacagcaaagggccaaccagccttgtatttgccatggctttcacagcttaggggctgacctaactggggtggggcgtgttctggggtgggggggcagagaaaggacagacacacatacaggaaagctgggatcagatgggtcatgtactgtgcttgaaacacaccggtggcagcctggaaagtcagtgcatttactatagacagcaggaatgaaggagaaggcagacagccaatcttagtaggaagtcttggtaggtgagcagtctcaggttgtagtcacgcaggaggaggaagctgtggttgatggcttctacatacaatgtaaacatctcaactctgaccagaggaattgctattctcattgatctgatgcattggagtttgtgacatggctgttctcacgtcaacaacacacattcactcatgactttatctattctgcacatgcattgagtcctccaaacctgtgagccaaaattatcatttcttcttttgaagtcacttattttagatattttttgagtagtaaaaagctggataatacatagtatagagaaaatctctgtaaagatgtaatttctagtactcagtgggccttcagctatctacacacacacacacacacacacacacacacacacacacacacacacagcttgcatgtctttgttcatgagaatccgtttccttgtttacacatcacagtagggttagagttggtttgatgagctgcacaaaactcaattttccttccctgggtgcaaagagatgaatttcttgcccccattactcttccattcctgttctacatacttaatcaatggaaatgttcctgcttattttcacaaggagaaactgtgatttgaagtgactggagctgctctttgcttgaggtcaacacatgtttgtgatactgttgctttgcaaacacacacacacacacacacacacacacgcacgcacgcacgcacgcacgcacgcacgcacgctcgcgcacacacacacacacacaaaacaaaaatagggctgcactgctggctcccaaagttcctagagtctgctcagaactgagagaaccactagagactgaagaaaatatcagcatgaccatgggctgtttgtggacttgggcctttcttctccttgctgaccatctaaagttaaaagctgctcaggggcaatagctctttatacaatttattaccagtcatcaaagagtatcaaatatgtcattttttattggcttcattaatgagtttttaggaaacttgaaggaaaacaaacaacaaggagagacactcctttctactgcaaggaaaataaacgtggtcattctcatcctgtgagaacaggctagtgagattacctgccatcaaggagttaacaagtgaatcattttaaaattctgtatgttgtctgaagctccaagcaccttttcttttctttctttctttctttctttctttctttctttctttctttctttctttctttctttttttcagtgaaccttgtggtgatttccttctaattatttagttgtcagtagaacttacaaaacaaatctgggtgattacttccttagagcacactaacagtcttttctcactcaacaaataaaaaagcaggcccaaagcaattacatggttttacaaaaatggctgtttggtgacaggtagtttccacaaaggaggtagctgactctggagtttcccacctgatcacttggcagtgacaccgctttcaggcagctgtgtgagtgtctggctcttatattagcagtatgtatttccttattttatgttagcatgctggattgttcttccacatggatggctcaaattaataatgcctatgttattcaggaaaattcacagatacattcttatatgatggcttgaagataaactttgcttccgtagttcacaatttaaaaaatgtacaaagcactccactgtgaatagtgttccaggtccccttgttacccactcagtcaccctgtttgccacttcctgggctactgtcttattagattaatgtgcggctttgaaagtgcatttttgaatgcacaagatcagaaattacacatatttacccccttatttgtttatttggggttgagattgaacctcactcatgtgaaactcacattttagtttttagtgacagtgccagctcttctccttctttgttggtagcctgtttactgtgacaacaaatagctctaaagtcatggtgggtcatgccaaaggactttagatcttgtatctgtaggttaattatgggcctactgcgttcaatggggtcaactagacttggggagggagtttcaggtcagctgctttgcaaatctctctctctctctggcatcctagctgagggaccatcagctccctggtatggtccatcttgcaagcagtcaggagctacagaggactgagaaaaacacagggcactttaaattcttttctgtaactagtgtgtgttcagttccacacacatgttataggctaatggaagccatgtggcccaattaagtgtcagtaagagcctggcatggtgattcacgcttatgaccccagcacttgggagggtgaggcaggaggattgaaagtttaaggttagtcaaactagagtttggggctacttggcaataccctatatatctaaaagacagtcagcagggtggagaaacatatttctccacaaaagtggtaagaacagtgaatgcatgactagttattagctgagcatgtgtagtgtagtaatatatgaaggcagtcagagttatgtttcgatgtaacctgtccctcatttcatcctttaaaaattcacaagtcagcataccttggtatatttacaattatctaaccaccatgagataactctaggacatttatttcacccttaccagtcattctctgttctcctctccctctgcttcagtatccacgagtagactgtgtgatgagggaagtctttctgtgtatatgtttctcttattggttaatgaataaaacactgattggctgattggccaggcaggaagtgatgcagctgggcagaatcagaatataagcagggacaaacaggaaatcactcttcttctcttctcttctcttctcttctcttctcttctcttctcttctgtgcagacatgctgagtcagtcaccatgtaggacttgagaggaataacaggtctggaccctttgtccggtaagattagaccacatggaaattacttagattgatagaaatgggttaataattgagtcagagctagccaataagaaaccatagccaacagccaacagctttataactaatatagcatctgcgtgtttctttgggggcagtgggacctagacgggcctagaaactttcacataacaactgtgtctacagatttgcctgttatagacattttatatcaatggaatcatgcaatccactctttgtgactgggttttatcttgcttttcacactgtatttaagtttcatccactgaatcttgtgacatgtgtaagtacataattccctctactgctgactaatcttttggtatgtagatataccacatgtgatggtcagtttaaatgtcacctggacacaatcaagaatcatgtgggaagagaacttcaacaaataattgcataggtcaggttggcttgggggcatgtgctttccctctaagtttacattgccagcctccttttacttttgcaggggacagagtgtcatgatgtagcccaaactggccttaattgtggtccctctgcttcagcctcccaactagtgagatctatcagtgtaagccaccatgcctgccacataataacttcttatagttttttagatgttttatttccatgtttcctatgaaggatattggtggaatgttttgcctcttttcgttttgaagattctcctctaattttgtgcaaaattatttctcttttatcttacttagtgtgaattatttatgcttcatattttgccatttctagcgacaatttaaagataccaactttctaaaaatattgatacagagactttttatgttgctcaggctggcctggagctcctgtgttcaactgatgttaccacctcagcctccctagtgctaggagagcatgaggatgtcacccataatgggctgctgatcttaagttcaatccagtcaccttccttagaggaaaacagcttaagcagagagctgtgctgtggttcccagaaagccaaatgtcccacagaaacacacagcagtgggaggatctggaacaccatttagaacactgatacagggtcagtggtcagcggtttggcccttttctctactatgctgggaatgagatgagaatcacaggcctttgagggctcctgtttccagtgtaaagaccttactcctttcatctagagtgttggaaggtgcgttttcattcactgcaaaccacctctcaatgccaatgggtattaatcactcaagatcactaaagggctctgcagattactaaatggttctgatgttctcggtaatgcattagaaaaatgaataaggtagtggcattataacataattaaattcagcccatgaggctctactgtggccatgctttttaagcaagttttctctaagagcatactgctgtctcttcaaatctgctcctgggagcagataatgccctctgtctgtgcaggctctctcaccttgttagtgcaggttgttctgagtgctgtcccatcattattttcggtgacaggaacagtcttgctaaatactgaccttgggaatctcctggggatcagacaaagaaaaaaaagataagaatacattatgcagctccaaggtggctcagcttggcatttccactgaagaatgatatgaatagaactttgcttgtatttatttaatttctttctcctaaggaggccaaagaactctataaatgtcactggcatcatctgtgtgttgctagcagcaccaaaaaaactccagtttctctttcgtttcctttttattgtttttgagacaggatttccctgtgtatctccgactagaatcaatcttgcttttgagggttgaggttgtatctttgaaggggatgacggttttcagggcccatcctgttttggcatgtcattaggtaagtgattacattgccacaatcttctgccatgatttgttgtcctgcaagcctgagagcaaagcaccaactacatgtgaactggaatctttaaatgtgaaactgaataaatctctcttttctataagttaactatcttaggtattataatgacagaaagctgacttccaggggaagacattttagcaagaatgtattaaggtgattaaggacagccactaaaagactagttatggcatttaaggattcaagctaagagatgatggaggcttagattaagaggcagcagatggggtagcatagaattatcttgggtagaaacgtcattttgataactttacagatgtttgtaatgcatcctgataacacattcacctcctattctctcttctccgagttctccttcacaggtctcccactttttcctaactagtccctgttcttcttccatatctttctttggtttatgatctactgagttcaacaagggtcaccatgtacgctctggtatggagccatccactggagcatggacagctcacccacttaccctccctcgtagtcttcaactgccaatagctctcttgggagggacagggagaacagagctagcttgatgtggtatttattttgagattcctaataagacattttaattgctactgtaaatgcgaaatgaaaagagattacagtttaaaaattttccctgtgtaactgggtaaaaaaaaaaaaatgtttccttagtgtgaatggggaactgagacaggaatcattttagggtcgtcaggaggaaaactggttctgttttagatgcacctcaacaggaggtgtgataaagtgttacagagaagatgcacaggaggcaggtgggaacaggagcttgggggtagaagcagggtatcctcagtgtgttgatggtagttcaagctgtcgaagtgacccagtatgtgtgtaggcccacagaggtggctccattccatcttgacttggggtctgagagtttgggccgattcttgcttcttcaaagttaaacatcaggatgtttggcctaaggtgtggctacttggtgttttgggttttatggaggtaattacatttgtttgttcgttgtttcttggtaaggaagtattttttcctcccaccctttttgattggggtatataacaactttgagcaataaacttggggtgggtccacagtattcactggatgccctccggactcttctgtttcttgtctatttcttccctcaatcgtcacgcctcctttcaagcacagatgaacaagtctgctggactggacaggtatggtggaaaacacttgtcattctagcccttgaggaacggatgcaggaagagcacaaatttgaggctagcctgagctataaagtgagttccaggctagcctgggcttcacatactgaaagtctgactcgagcaaagcaaaggaaaataaaacagtaaaaatgaaaactaaaatggaataaaaagaccagagttgatatctggaagagacaaagaaagggagcccacgggctttgagttccttcttaggaattcgccaggtacttggtagctttccaggggatccacgtgattcttcacacccctgcgctgtctttattcagagactcatcggacacaatggcgaacatgctgatgcaggtagtaggcagctgtttctgaggaaggtactgtaaaattaccagggaagcctataggcccctttcccaagccttctctaccagaggaggctagcgggaagacttcagtcttctctctaggaaagcttcctaatgctctgatgtggtccagggtagaaccacatcaatcaggcttgagtgtatcccatgcttctgtgagatggagaagtgggttttcaggatgctatgaagtatcacggacaagttccagaaaggaaggaaagccttaagccaagatacatcttaggtcctggaatgctacatccatttccaggaaaggctgctaatcagagacagcactcattctgacaacttcccagatacttctcaatacacaccacgccaggtaattgagcaaaaataaaagcaaaaccatttatttatttatttattttggtcaggcagggaatagctagatgccatgtttaagaactatggtattgtgaagcccagtgacacatatttagtagttcaataggaccaagaaaagaatggctacaggtacttggtcaattgcttgggcaggattggctcccagatggctgcaaaatagactaagaacttcgaaaagtattcttcaggtatatggttaatggactctgtcaatcaaaagtaagtgatagtgttctgtttcagttggaaaaattatccctggaattacccatatcttagttatttttctgttgttgtgataagacccatgacaaacacaacttataaaggaaagtgttaaattttggcttatggtttcagaaggttagatttcatgatggcgggatatgggcatggtgtggaatacgggcatggtggcaaaaacaactgaaagcttacatcttgatcctaagtaggaggctgggagagagggagggaggaaaggagggagagagggaaggagagagagagagagagagagagagagagagagagagagagagagagagagaggtgggtaagtgggtagggggcctgagaatggcatgagacttttgaaacttcaaagcctgcccccagtgacacaccttctacaaacaaggccacaactttctaattcttcccgaatagtcccactaactgggtccatgtattcaaacacatgaacatctgggaaccgttttcattcaaaccattacaacccacagtaagaaaaaaaatattctcagagtctaatatttaaggagggttagaaaaagcccatcctaactaagcagactgaaaggtagaaacattatagaatactcagaggaccttaattcaggctgcaaagctaagctaaactcttcatgacagaggttgccttacggccatctaaccagtcagagcatcctatgttaatagtgaccttggataatatttcaagttcttagacatgaatttaggcacatttttaggcacacgttttagaatatattaaaaaaacaattataggtgagctaactaatttgtgtaaacatttcagttccttcaattttcccttttgctattttttatgtgagaaaaggaaatgaatataaattcagtagtgctgaggcttattagttggaagagccaaggaccattgacaagtaaagtttgtatgcctaagtgagtcacaggaaagcagactaaaataacaagtgagtttgggacttggagtgataactgatgctcctactctgatactacaggcttcacaccctctgaggagggcaactgtagaggactaaatgctagcaaataatgaaggtctctgggtgtagctgagacagaggcaacttctgctataatcccctttagccatgatcaccacacccccttctccaataactcccattcaaagctaaataggctccctcttctgcatgaggattttcgtgatacccacctagtccctaatgaatccagtgggagcacttactacagcaccactcatctgtcattgtaaatatttcatgccaacccgatcccacgtgaggataaaagcatcttaagtccttatgggaaaacaggaatgcttcactttctcctgggccatgccattttctagtcagataactggaaatcggaagtaacatctgtggtcacccaaactggcaagcatccttaggagaatgaaaataccttagtgagctttagcagaggccattcagctctcctcagattgcttcaagcccactttcttattcaactatcaaaacaactcctgttgttaggaagtgcctctccatactgtactgaaacccagctccctgtcaggtccactaattgcatttaagtttgtcctctgggctttgaaagattatgttggaatccttttccacctgagagtcctttaatgtccaagacagatattgaaaaccactaagcctttttcttatggactaaatatctttttcttcagaccatcaatgtctttgaacaccatccttactgagtcccccagattcactgggttgtctcttcagagaatactcattttgctcctcagccggggtagacaccatggtgcaaaaacaaagagtgcaagctaggagttcattttgatagagtacttgacacctaggcacttgacacctttaacagtctggattcttctactgagagcagtgtcacatgatgggtccaacatgtaatatgacaaacgcacagtggtctgcgtttccctacaactagtttttttttttctagtaataaagctacatcatattctgaggggaagatgtgtgttcattttgaacaatattagatttgtttcaaatacaaagaaaaccaacaaacaagtgctcttttcaccgatgtccaatcattttcttgcccagcttgtactcagtattaattcagtcttctctcattattgtagtttattctggctgccacaacaaaaccaccatgaatgaggtagcgtataaacaaaatgtatttattactcacagttctgtgggttggaatgttgtagattcagtgtctagtgaggaactgtttcttcacagagggatggatcatcctgtacctccacagtccacttttacaaagacattcatttattcatccatagtttttaagggaaggttatactacacaacccaggtttgcctgaaacttactattgaacatcggttggctccttaagcttctgagcctcctgcctcggcctccttagtgcctcaacatatctggcccaactaattccatttatgaagcctctgccactataaccccagcatatcccaccacttttgtgggtcaggacttcagtggaaggggccacaaacactgtactcaagcaaagcaaacttgagccctaatagttgtgtttactggacttcattttctttagttcatctcacacttccatgggtctcccattattatccagaacaacagccactccttgtagctctggtccccaccccaccccctacgtgtgaatgggcttactggtctttttcctgagaccctttgcctagtctcaggtaaaagaaggtaatcctgaggacaaaactctgactcttctccatggactcttctttcccaatcagcattctttcttttgtgccagccttcattttgagtccagcaagccatttattcatcaccatcctgtcttcaaactgaacacaaagctttacaaacagcacaacagtctacagtatttcagaaacattggatgcatttcattatccctttcctctatgtattagccagagttttgttactactataacacacaccggggacaatcaacttaaaaagagaaaagacttggttagactcagttttagaggtgcaagcagtagatcctttgcttttcagcctctcgtgcattgagcaccactgcattgctgggatgagaagttcaggaagaggcagaggcttgtactcatgtagtccctttaaggacacaccccggtgaccagaggacctctcactaggcctcagctcctagtttttccatcacttcccagcaacactaagccaggggccaggccatcaacagcacagcctctgaggatatttaagagtgatggcacttaaagcatgatttgcagagtccccaagaattgcatttccaagttttctcggtcccagtggcttgaactgccctgactctagagaccaaccctgctgaatgccatttactatttcttccatccccaggatctcagttacctctctaggtgaagctgcacagtgtgggaagcaccaggtttggcatctaaagggtggtaggattatgtttcagctcaattctcccagatgtataacactgagaaagtaagcatgtcattgaagcccagcttcttcatttgcatcgagtcctagcctcttactgttcatcaatatgtcattgtaattgtgactgtctttattccagaatttcaggttgcttttccttgctaagaattaggaagccaaacaggagctggggtgctctgtgcttccacatctccagaagtcatctgcctgtcaagccagtgccgagtttggctgtcacttgatgagagtcccaggatggacagctgtggtcatgccctccagtccctcctggacactgcctcttctctctcacagtgtagttattacctctcagttttcacattctgagtgcaacacactccctgataatgttctcaatgattatagacagaggtactcctagcatcttcccagaagaaatgattgtggatttctaggccactgtttctctcgatacggacatcatcaatgtagactgtccttccaagcttgattagctatgcactattgctcgtgtcccttgaaagcctgtgcattgaaggcatggagctgttgtgtggtggtggagccatgagaagaagggtctagtgaggtcaatgacggtatgacctcaaaaggaacccagatcccctcttctattttttttccacttttaagacacaagtggctctactggcttcataccccctctatcacaggcctaaaagcaaaaagccaactgattgtagacttggacctctgaaatcaggtgcatacacaagccttttctctctacaagctgattcacttagacgtttgctataatgagagaagactgacgaatgcacctcagattaaaggcgttttttttttttttcagaaggacaaaatctgacccagaacatgagttgattttatagatgaaggaacagaagatgaggctgtttgcttgctgttccctagatttttaagcaaaggagtcaaaggcacagcctttggaagccttccctagtgctgcgtcatcaagtctctacactctttgaattctattctgaacaccattcagagcctcattggtaacgtgtgctcaattactgcacattaacagaaagtggccaacattggaaaactgggtaattttggaattattttaaatcagaacttaaacatctctgcaggaaagtgagaggagcagacacacaataaggacaaatcccagttttcacttctcttttgtctgatactggtgtggataattaacagggaaatggccacaaagtggccaaagggattgcagcagtggagaataattcaaccatgagtttattgtactataaataatagcaagctgattgcagagaagctatttcttagtgatctaaaggcacatgtcttcacttccttatatcacttttaaatcaattatcctgtaaaacaacaatgggctactgtgaatagaattccctttagcacagatctcctctgcttgccccgtgtctcttacgtttccacatagtgaatagcctcatattgacaatgagctttcttcttgaaaatcaaaatgtggtctccatgctaccatttaataagtgctcagaacattcctctatgaagtgggtgtatgatgggaaggggggttgttctttgccatgatgacccagaggaagcaggttcaaaggggaggtcatgtctgtctatggtgagtcttgatgccactcaggtcagttcagtattgctgactgttgtccttccagtctgagccagaggttcacagtgctcacggtctcaccccatcattggggtcataagtaactacagttctactctctgtcagacacaccctccatgtctgatgatggagcaggggacagaagaggaaatgtccgaaccatcattgaaattttctagaaggagaaagacaagtgtaatctataaacaagctgcagtcacactacaaggaacagatactgaattagtataagaaagtaaagagagtacagataggttgggttattttatataagattaacataacagtcctcattgagaaggtatcctttgagataagaacggaagaacaaaaccaacatctgagggcagaccattctggatgggagcaacagcctgtgcaaatgccctgagccaccggatacttaacaatgcataaaggatcaaggggaccctggggctggagcacggtagccaagtgtgctggcttgtctctgtcaactgacacaaactagattcagctcaattgaggaattgcctaggtcagtttggcctgtggccatgtctgtggggcatttttgtaggaaggactagctcactatgggggatgacatcccaagaatggtggtcctgggctgtctaagcgatgcagctgagcaaatctgcagaagcaagccattaagctgagttcctccatattctctgcttcagttcttacctccaggttcctgccttgagtttctgccttgacttcccatgaagatgaactgtaacctgtaagccaaatattctttttccttccccaaattggttttgatcaccattttatcacagcaatgaaaaccaaactagggcaccaggttagcacaccaagttgcaatgtggcaacaacaaattcacacaatcctacttattgtaattgtcttaaggacatctttcattttgagtggcttagagtcctttgggagatgttaggttcagaaatcacatagcatttacacttgaaatgatccctttgaatgctctccatggattggatgcaaggcataaaataaaggggggcattcttgcccaaacttgactggagactccttgaggaaaggatacctactgtgcttgttcaaattctttgtagaagaaaaataataaactttcattcccagtaaataaataagtacttttgggatgaaaattcatgactacactagtaggcaataacaggaagcctaagctcccaattatttataaaaatagacactagttccggtatttcaaaagtattaacataattagatttctttcccaaggtaaagttagatccccaatattgaagttagatatgaagtcaaaagctttaaaatgtcttcttttggtggtgatactactactagtaggttttttgcttgctggccagaagtcctgtctggcatataaaatgggtatgcaaccacattcaagaattttattttcaaacaaaaatattataacatatatggttcatagagaatatagtaaaatgaatttgaatgacagttgagaattatgtcatatatatggttttgaaacagaaaaaaggcccagtaatacccatgcttgtttttcttatttacaccatacaggtctccattacatgagaaaattaagaaagagaatattaaaatctaggatacatacagatttggggagatctagggtgtttcccagagtctcaatctgaaaaatgggaaatccagaaaattttaaggtgataaatgtaatattttctcccttacatagtgacacgtgttctgagttgttgagttgtttgtccttagttgtttcctggcaactgtaactagccttacagactccttcaggccatttcatgtaggacaaactgatgagcacacccagtccctctaaaccacagtagatagggcaaaggggagaagctgatgagggggtggagagagacagagagagagagagagagagagagagagagagagagagagagagagagagaggggagagaagcagctttcagctagtgtaagaataccaaggaaatattcgaaaaggttggaaacaaagagcattttgctgaacaatggaaagatttagggaaccggtaaagatactctcaggttcctacaacttcctaatgtcccagaaagctgacaaatactcttctctttcatgtcattctaacctttgaggaattaatggcagggacctgaagagtagtaattcaggggtatcagcaaacccagaccctttgtgattctgtgaacccccatagaggataaggaccaactgaagccaagttcctctgagcccagccagacatcagtcatggtctttcaatgtcacaggtgaccagattgtttcccttaggtccaagcctccaaattcctgcttctccaacttaggggagtgcagtgagagccacaggcaacagaagaggcgctgctgaattttggtcctggctattgccttcagttctgggatattccagcatccctctgtgctgctacttaagcataaagattatcaatcatttgcttccctagttctgccagaagggtcgccaggtgcacgacgcagacctgtcagtggtagggggccttatctatccatccactcacccacccacccattcacccacccatccacccacccatcaccaagcccttcctcctgcttagctcactttgacttctccaggccttacggcggcgcaggcggggcgcgggagcgtgggctggccagtgcgggggacagggcctgtgctcccgaggggctgtggggtcgggagaccagggacacccaggggtgtggcggcggcagagccgagcccgtccgagccggcaccttcgggcgtccctgggccacgtgactgtcgcctcctccctcctccagtcgcgcgcacgggccgggcgtctcgactcccgcgcgcgctcgactggtcccagtccccgggaggagcagcggaggagggagcgagcgaggcggcccgggggagcgggcgcgagcggcggctgccggggccgcctgtgcaccgcggcgagggtggcggtggcctgagcagcgcgagtgtgatgaggctgctctgcctcgctgttccgctcgccgccagctgacagcgcttgcccgcagcacgcccggaggggagccgcggggccgtgaccttggccgaggaggtaaacggagggggcgggaggggaagaggcggcgtcacccggagtccctgggacccccggcccgtacccagccctcaccctactccggcgggagccacgttcccccggagccgcgcgcccggccgggctggggcgctgcgcacgccgcggtccacggtgctgaaactgctgcccggtgcggccggtgcctcggtgcggggcaaggctgcctgccatttgctgcctccgagacagagcgagggccgagctggatgagctgggactcagcccgctctgattgctccaggcttgtgcagttcgcttgctctccgaggtgagccaggtgattcgctcaggatttgacttccccactagcctccagttgcctggacctaattaggatgctttcttccaaagatttgtcaggattaggtccagactcagggctctgagggaggtaggagcagcagaggaaccatgggctggcagtgaaggcagatcaaagtggagaagcctctgcccgggctgtgtggggaacgcgaggaatggagagaacacttgtggggatggggcctctgacttgcctgccatgggaaactactggactactactgggagaaaagtgggctgctgtgggtgttggctgtcgccctttgaggagaactatcaatgggagctgcaagtatccgagagagctgtgtgtactagggaagcgcaaaccacagggttttaagtgagtacctaacacttttaataagagagtgtccacaaaatgaagtccacagaaaccttagtcagatgtcttatttctaactggaaggttgtcagttaaaatttcttgggactactacagctgcaaactccttgctttttttttctttttctttttctcttcttttttttaaagtccctgtcctgcatcctccagtcagcctggggatgacagaattctccctgtgattgggtactgtgagcatgaagatgagtcaggggagtctgttcccttgaggactcccatcaggatctcactggagcctctctaatcctttgcagggcaaactgataatctctgtaacagagggaccaagtgctgggtgaaatggcccaggggaataattatggacagaccagcaacggggtggcagacgaatcacccaacatgttggtgtacagaaaggtaaggattcttcacttccctggcaagagggaaacatcagcttgctttcttctttctttctttctttctttctttctttctttcttcctttctttccttttttcttcctcatgtcctctgtttggatcacagtatttatcggttttatgaattcccagatcatcaatgattatgtactacactagaagatgattgaatgctcccaagtggcaagaagtggaggagactggcatggttcttgttgatcgttagagtcacctgtccttagtgatcacagcaagtttggccattcaattcattttgtttggttcacatgatttaataacatcccttgtaattttcagaggcttttaataataccccttacaaacatttagagtataataatttattaagtgtaccatactttggaaataaaacgagaccactttatatccatggatatgcacgatttcataagtttactcacaactaaatggctctagttcttttggtcttaatctattttttttactttgtattatttctgtggttttgtccaaagcatctatgctttggtatggtatgctcaagagatgaatctgtgcaatccaaattcccgcttccacaaacatatctgacaggtttctgccgtgtgcccagcaacaaacttctagctgcagacatatttgggttttgcatgtgtttcagattggttgcttaggtaacttctacatggctataatcaacaagcttactaaaattaaggatgcagtattctttatgtaacttctatgttgattttcccttttgcagtttttaccgggattattttttttttaggtgtattactcagggtgtgtatcagattaagtttctttagttgacactgacaatggcaactggaaatcatacattgaggtcaagaatgtcattaagggttttgattagcaggagcccactgaatccaggatgagtgtagatccatgagacgtgagttgattgtgaatacagaggaaagttggtgtgctgccttaacacacgcagaattctaacttctccctgtgtgacccagagatattaggaggtagtgaggagtgtgctggagggaacattgatattaccctaagagctgatacatccagcccagacataatgtcagttgcttatcctgtagcctgtggacagtgctattctgaatacttgtaaatgcagtcagatgtttctgggacaccacagaattagagggacgaaaaataagggactagtcgactatttcattgtttttatccaaatggatgaacttagattcctatgcacttaaacctaagtcatcactattacattctgacactgaatacggtaactgaatgcttgcgtattttatacagagagtccgtctagagaaaaagaatattctggtggcagctaggaactttaaagtaaattgcaatatttccttttatttgcctcaactttggatgttctaaagtgcaggatgtgagaatgtaataatgtgttttaggagtatatgcagtatggacaactgtgcttctagaggagagattatgatagtatgctatgtttcttaaggaacacagctgcattcttcttctgtttgcctattgacagatgacctggataccattatttgattgtttgctgcattcaagtctcaaattgccaattttgagtttactttataaatttatagtttcaaattgctattagttttaaatttaagctcataggcttcatggagatttcatggagaaaaatctaccttttttgtccttttaaggcatggtctctctagatagccctggctggccttgaacttacagcaatcccccgactcggcctctcaataacacttcaaagttgttttaaacaaaattatttctgattgggcttaagactgcttatgatattcattttacccttctctgattagtttttttttcaggggttaatgacacatatcacttagtgtacagggaaacattgcctgatgaaacatgactgataaaaaataatcaagttcaataaatcttattcataatgtctaaccatagattcaatgtctgtctgaattgcctgaacattttttgtttttttgtgtgataagtaattgtttttaaataatgccagataggtcataaacacctggactcattatcatttgctagtcattgtggaaaatggtctacgtgtttgcatgaatctagcaggacatcatgacctttcgatttttgctttacttttataccacatcttctatgggcttaccagttgatcacttctctgtggaggccattttttttatatgaatcaaaaagtaattggagatgtatgcagggtgaatctgcattgggaaatttcaacagctgcccccttcatgcagaaataggctcttgttacaatactaattgtaagtcaaccaaaggttcagcaaagaccttcagccccaacagggcattgctcaataacagctgagaaagcagagggagaaattgctgttttattgactgatgccaattttccacttcttcttctccgttgaagtgcaattcttgaaggtgtgatctgaaccggccagatccgcgtcacttcctcctctcctcctgcctctctccatcatgttgctttcggctcagttccctcatggcgctcaagacatatgtgtgttgctttcactttgtcttgataggttataaatgattcttagaaacaccccggggagagatgcagaactgtaaatggttaccagtgtggaatacataggaatttggcactgtctctctccatcgtgatcaccctaatacaaattataggagttctgacaaataatgaacaaaggcagtcatctctttttccatgtagaagtctattgtgtgtgtgtgaaagagagagagagagagagagagagagagagagagagagagagagagagagagagagagagagagaggtcaaccacgggtgtctttcttcaggtcttcaggagccttccattttgttttttgagacagcatctttccctgacctggaacttgacaattggaccagactgcctagctagtgaattccaggatccaccagcctctaccttaccaacactgggattatgagtgtgtgtcaacatgtctggctctttatgtgggtgctggggattgaactcaggtccttatgcttgagtggcaggcactttacccaatagtgcctttacagaagaaagtctttagtatgttaaactatgattgccaagctgagtaaatgttgccactctaaaggcttcagggcatggcagtactgcctagtaatcagggctggtacttaacagtcagtgtggcttatcctgcaaatagattttagtttaatagaaaaggtctctagagtttatttgatgtttgatatccactttgaaaattgtaatgaatgaaatatttgccttatcaattctttgctttataatgttgcctttttataccaggaagttaaattagagtgatatgttctctgatatatttgaggacattttaaaatgttgtaaaatgatgagggttgaacacttatttcatgctcccctcagatgggtgctaactagattggagtcgtaagtagtcagtttctttgagatttgaccggctcgaacataccttggagccagacaagtttcttgaaatatttgtagaggtggcatgtcagaaattgagttctgttctgggatggtgatttgtaaacactgttctcagttttgatcatctctgggagaaacatctactgtgatcaatgctgtttgcaaaagatggccgagcttgaacccagagtgtcgggtgatgctgtccacacaaggtatctggccagcatgctgttcactaaacagcatgtatccctcctttcttgcaatggacaccttgcactggaaaaacaaaatgcctatggcaccttggggccagtatttcaaatttgctgtaatgccggtgcctcactagcaagaatgctcaaaatatccaataatttttgatattattgcagcaaccatttatgctctagctgtcagaaaagaaaatgaaagtattcctccttagttgtcttattaaaaggagcatggttttggaaacagtaaacctatcaagtgcaccgtgcctctatcctttgccctctcattcttgcttgcattcaactctctccttctcctctctcttcatcttctatataataatttgccttccacttgtatctttttgcttttccatacaaaacagaattaaaggtaaaagtatgttgtttattttagttacaagagagaaaacaatgtctttgataactcacagtatcttgttggagataactggtcctatgcttgattgagtacctactgtatacaggtgctcaatatggcactatattgtggttgtgcatcccatcagtatttaagagtaaggatattataggctttatgaacatgatggaacagctggcctttcttacctgaagggtgacaaccagtgtgccatttggaaggttatctctgctggctagcttcacctcagtatatttggaagctatttcttatgtccctctgtcctgggagagccctgagacaggaacgggctccatttcttctggggttactggaccacaggcagggctggtgtctcagcttggagctgcggtttgcttttactcagtgaatttgtcttcacaagcttgttagtctcataaccttagagggtgttgctgtctctaactcaacttgcactgttaaaataatctgctgggttttaaccttagttcccttggtctgtctgtgtttagtgcatgttagcagagggggtagtatttgtgggtgaccacaagagaaaggtatgttagaaaaggaagatgtatgtaaataaatacaaaggccccgggcctttaagcctccaggttttgaaggtgagaatacagatgggaggcagacaagaatttttatcacatttctggaacattattgcagtggtgcatctaattagatgactggcaagtgcctttctggacgaggagatgttgtctaccttagagacagccagacctctctgtcctctttagtgacacaatacaggacagggtcctcttcaacatgtcttctagaggagatggaagtattttagaggcgatactttcatgatggatttcggctaacaattaatgagttcagagcaggaggggcttcctggttgagctctttgcttgcccaggctgtttgtgggatcaacatgaggatctgtggcttggattttgcctccttcactttccatctccagtgtctgtgaatctaattgatcagagaaaaatgcagatccaccaagaggaactgtccagggattttattgccttctaatagccttgtggttcccccaagtgatgggaagctgggtatttttaggtggtgtgggtgacagaatatgatcactgctgagaaaacggaaatatctccaatctagacagtttagtgacctaataatgttcggttctccttgaaaacagacctgcagcaaacaagcaaatggagcttcctcactttgtagtgtcgacaagacatttgaatgtcaggaccacaaagacttctatcccacacagcgtcaatctaattataaaataattgtaaatgacaaagtgggtgctcagttcctgagggggcgggggaagacctggtttctttatgccatttgctcaaggcaacatggggattttacttgctttcattttaattccttttctgttacgtctaattccattaacaaaaatctgagaatagtagaactctaaaacacaatcatgggcttgactccagcactacagaaattacccacctgcttaggctagaaagcaccttgtctgagagacctgtttatgaggaccaactgaaagtttgccttttggaaaagtgtctaggaaaatgatagccattagctatgttctttctttctttcttcttgtttttttttttttttttttggtatgccctaatgtttattcattttttatctttggtggatattttattttattttattcattttacgtaccaaccacagttctgccttctctttcctcctcctgcttttccccacctctccccaagccacccccatccactccttggaaagggtaaggcctcttgagcaagacatcccatcatatagaattggctttaaaaagccagctcatgcactagggatatatcctggatgaaggttctatgatgacagttagggtagtcaacaatctgattatagggaaaggccagttcaggcaccctttccactattgctaggggtcttagctggggtcatcctttatggattcctgggaatttccctggcatcaggtttctccctagtcccataatggctccttttatcaaccaatctctttccttgctctctcacccattcctgtcccaactcaaccatccttcagacattcaaggggttgtgcaacatccgtagccatcagggaaatgcaaatcaaagtgactcagagataccatcttacacgtgtcagaatggctaagatcgaaaacactgctgacagccaatgttggagaggatgtggactaggatgtgaacacttccctactactggtggaaatgcaaacttatacagctactttggaaatcagtatggcagtttctcagaaaactgagactcaatctacctcaagacccagcattaccactcttggacatatacacaaaggatgttcaataatgccacaaggacacttgctcaacggtgtttataacagcattatttgtaatagccagaacctggaaacaacctagaagaatggataaggaaaatgtagtacatttacccaatggagtattactcagctggaaaaacaatgatatcaagaaatttgcaggcacatggatggaatcagaaaacttcattctgagtgaggtaacccagacccataaagacaaatgtggtgtgtacttactcactcatatgtgcatactagacataaagcaaaggacaacgacaccacaatacacagccccagaaaagccaggtgacaaggaagaccctaagagggacacatgcatcttctgggaatggaatatagataagatctcctgggtgaactgggggtggggtggggtaaagggaaggagataggagaatgagaacatgttcttatgaataaatgtggagatctttttacaagatgcatctacttatgtattttatgtgtatgggcatattgtttgtatgtgtgtctgcacaccagaagagggaatcagatctcatgggactacagtcattgactgttttgaactgccatgtggctgctgggaattgaactcaggacctctggaaaagtagtcagtatccttaactcctgagccatccccacaaggagatcttattcttactctattttgatggctagataaattaggagatctaatccaatttggtattggatcgttttagccatgaagctcaactgatctctggtttagttgtgtgtctagaaattacagtcctaactcctttcactccagttttcttattgacaatgaacaacaacaacaaaaagaacaaaagtttccctcctgggcttgttcagtgaaatagcttaggggaagcgtcttgagtagcacctaatatgtatcaggcccgtgataactgtctattgattttaatagtaatatcactatttatctgatgaaaattattgaatatttttgtatgtgtcaggttagttagactaagttggttcggggtgctttgattataccattgcagtggcacttacagtgtaagtaagttcatgtagccaccttctacttgttaataagctctttctaagcagcatgtatccttgtgtataacttgtgaataattgtgcatatatatgtgtataactttatgtataactgtgcatgtatctgcatagttccgtgatattatataaactgaataaagccataggattgaggcatttcagaggtgatggggaagtttgagggttttttttttgtattgtgaagtttagaaatgacattttctaagtacatagctttatttggatatttgtctttctaagtgtactctaaataatcaacatataagtgacacataattgatgaatggagtgtccttgtaggtcagtgctagcaagtgacctacatcttgctgctctatcatggattatggaaggttatctaatcaccattatatgcagagtggatgttgtgtttgctttgatcagtgttagctcttggcagtaatcctagggggagttagttatatctattcgatgagtagattgtgcttatctgagtctatatggaaattctggatcaatagagaccctggatgtgatactatatggcagtgctgtcaccagacctttccatcatgatgaggaaacttcagagacatactgtcccatctttgggtcacttgccacactgggtaactggacactttgaaatgtggccagcattactgaaggatgaatgcatgttcaatcatgtttggcttgaattaattcagacttaagtgttcatgtatctggtgattattggattggacaagacaatgtagagacacagaacaaaggaccttggataatttgtcacacgccaagaaaagaaataaagcaatatgttatatttcatctaacaactgactagtctgtccctgtggctaggggtcatttagaagatcactgagtttcccatttttagtcaatgccacatgacattgcctgatcacacacagccagccactctggttcagcagaaagctgttgtctagtacagaggtgtgtagagaatatatgtactggatgtttatatatgtgcatctctgggaggtgggacccaaggctaggccactgctctgccactgggttgcatcccagccatcattaaaaatgtacctattactatttcccactttcaacttttctgaaaggttcatttcccatggaaatcaatgtcatttgtcataaactttacttacatttaggcttttggattttttgtagttagcaaataccatatgccatttacatacatgatttgattccctagaaatagggaaacgtgttggttattagtgtctttgtgttggggggtgcaggtgcagctgtgtagatggactgtcctcatgggccactctctccatccttttgcatcactctcctagatactgcaatcgccataactaacacacatacattttcctagcaagagatctggagacacacctgtgtatactgtgagtatccaaggtcactaagaaattaattacattgcttggagctctgtgaggatggagacagagctgtgttctgttctgtgtcccagcttttccatcaatggcacgagatcggtatctcgtagggtgtataaatgtatgaattagtacataaaatgtgagatcagtcctaagtaagttctgagcctctttcttgagttgttttctagataaaatagacattggaatcacagtcttcatcatgcccacattcagccttccctcatatggactgtgtgtgtggtgattggacaatgcaattgttttttttttttttttttttgtgccaccagtgacttattttatagcagtgaaacatagagctcagtctattctcagcaggttgatgacggcaagtaaacagaagcactagccagatgaaaagttatttatttttggtaatcttgtttctcaatacatatatatccacctctgtctcctgtcagcaattcagggggcctagcagagtcccagaatctaacagctcctgaccataagaccataggaaacatgagctgagttgaattaagagaatgttgaaaaccccagcatttcagtgagatgcacgaggcacaagcacatgtcttctccctcacaaaactaaactttgtttttcagctcccccacccccagtccagccaccccctaatcctgataggtcagaagataggaatgtctttaaattagctacattacaggagaaaccagtactcttgcacctagagaattagcttcagtgtttgcagactgctgaagcgcaaatagacttgctatggattaaattgctttccctctggagtgagtttgctcatctgtaaagtggagataagaataatcggtattgttaggattacatggatgtacatgctaaaagctgagcatggtggctcatgcctgtaatcccggcactcagggagctgagggaggaacatggctgcaagtttgaggctattatgagctatgtggtgagttccaagtcagccaggactataggatgtgattctatttacgaacaaacatgtgcactgagggcacatggtaagcttggacgagtggggatccttcagaatatgtaactattaattttatattacattaaaagtacctagattttcctcataaatggaagtgatggcatttaaagacattttttccctttaagatttctcatacatattttaggattgctgctttcacaaacttagcatcctctcagcatctaaaacatttactaatgttgcgaccctttaatacagttccccatgttgtggtgactgccccgcccccacaagccataaaatcatttgtgtgtctccaaagaatgcgttgcaacttctcctccttctcctcctcctcctcctcctcctcctcctcttccttttatactattgctttgtagttgtattcagcagtttgcttatttctttatccaggagtccttgggttctctctatctttggctattgtaaacagtgcagcaacagatgtggatgccgagaaatctctaaaagtctctgctttccattctttaggtatgcacctggaaataggactgctgggaggcacagcgattgctttttcatcactgtgcattcgcacaggtcgtcagtccacaaaggttctgcctgctccacattgtcacctacacttgttttctgggctttgtcaatattcattcaaatggatgtggagtggtagctcactggggctttgatttgcattttcctgaagatgatggacatctttcctacacgttctggccatttctttattcctagtgagtctcagagcttgattaaaacacaggttaaattgttcttgcttgaccagggcttgactcagaggattatggcttagacttctgcctaaccaaggctttctttaaccaagattacattgcccagcttggcttttattgaataagaggccactaaaagctctctctctctctctctctctctctctctctctctctctctctctctctgtgtgtgtataattatatgtatgagtgttttgtcatgactggtgcctgtggaggtcagagaagggcattggattccctggaactagagttatgcatggctgtgagctgccttgtgggtgctgggaaccaaacctaggtactatgcaagcacagttaagttttctcatgctccagcccctctttgtaattcttaaagttgctttaaatttacccattagtttagcatccacagaggaagggtgaactctcagctatagactactttgtaacatcactaacaattgaagtatgttaatgcagaattaatctttttgggtggtatataccgttaactagtattttcctggtatactgaaaccttccttgtgccagtgagcattaggagaacacgtgtcagatttctagatgggggaacatttttacttgctgttgtgatgatggtctggccttctatggctgctgctgctgctgaactggggacacgacattgtttctagctgcttcatgaaagcagtatgagaattaagatgtcctgtctgctgtggacagtacggatttgccagcagcgaattctatgatctgtcttagagagctgacaggctagtgagcaaagacagcatggtgcctgatatgggttacgggcaacactagccactgtgattgggggtgaggagtcagttgcttttattacttaatttctttcatcttcttttctttttccccccgagtctctcccccttttgctgcataacataagtcttcttcctatttctttatcagttttccatcttattagttaaaaaacgaaaaacagcatgtaaaacttctttagctgttacatgggcatttcaggttatggaaatatatgacaaattatgtttttaattttacaaagtcatacatataattgttaaggaagtcccacatcacaaaggcctggctctaggtacgaccactcccttgtattaagagaaaattacataatgtataatgaaggaaattaatttatttatagttttagctaaacccggggagaaagaaaagtcaggaaatactcatgtgtagattgcattctaggacccagctaccagagatggaaaagggttatttaccagtcatagaggatgcagtctttgggggaatgggcatttgtactctcagcatggcatttcctgtagggatcccatttcctaatacccttttacacggtcttatctcattgtcctatgaaaatctgtgagcttgttattgatgatttccatttcacagatgactttcatgggggctgagtgatctacctggagcatggtcagaggtgaagacctggaatttctagaggttcatggaccccttggaccagtcacttttttctccaaacctcagtgggaatcgggttaaaagtttttgcttcattatgatgctgtaaggatcaaaaatgacaacttaatactcagattccaggtgattattatatacatagatgggatggctctagtggaccatctcatggagtttggtttcagtgtgtgaggtcaggctaacacagatggtaccccaagtaacggataaactcaaacccagtttttcatactaaacagtgctgccaaacagagcacctgagttaagacaggttatgccagccccgttcctgtgaaggtagcgtttatctccccataaagatctcccctttgccttttgttcatggtgctgtgtgttgaacccaggacctgtgacatgttaggcaagcactcagccaccgagccacacccttgttctcccctcttatctatgtagggagcatccctctgcccccacccctgccctttgttctttcaaattcttgtgctttctgtttcccttccaagtgcttttatttttacattttaattttttcagttttatctcaaagtttccattatcttttctttattacatttttatcctctagctttagggatttacttagaaaatttaataactgacccttttgagtgatggtgtcggtgatgctcaatcagtgaaaactgcaatagcacattgaaaaacaacggttactcgtcctaaaaccatgaaatagctacttcatgggtccttgaatgaggcaagcaaaccatatttctcaaagagttttacaataatagactagccaggctcgaaggattattgcaaggaagagagatgcatttgagttaaaccagaatcgttactgttcattagcccagcaaagggagatatcaaacaagtcactctttaattgtaagcattagtcttgcaaaggcatttattcacggtgcaatattttcttgaactaatgtaaagcacgttgcataaattctgactgaagttcatttgggttaggggttgggatggggtcaatcaaaagcatctattttgttggcagcagcttcttgtggactgggttaatctatggccttaaagctccttggtattcttgtcatgaaagtttatttgcaactaattaatttacttgctgcatattgatttgtttgactcaaagctcattgccactgtataaaatggttataaatcactttgtccttggtttttcttttcttcttccatagtcatagcagtctccattttcatctaagtatgtggctgccgtaacaaatattacagctctctggcttccaagcaactaggaagggacaaattatgtattctggtcaatgggataagagtagataagatataataactgagaagtcagagccttaacaaaaggggtcactgagagaggatcctcatgactccatagtaagaccatctcaaaaaattcaattgaaacaaaccaacaaagtaagcagtaaagagaagagagaaaaatacattaaaaaagaaaatgccccctcgccttttgccttttctcttcctccccctgttcctctttctttccctctctctcctgtcctcttcctctccctcattcctgctggttagaacttattttgttcaagaggtggaggctaagaaataatgggaactgaacaacaaaagagaattagttgtaattttaaaaagtggagcataagaaaaccataccatgccacagagcttgggtggaggggtttttttattggaggaaagtgaatgtgaaaattggggaggggagaggggagaccagcctctggggatgggagcagcagaagagaagagaggttggggagggagggagatagaaggagagacagagaaacagtagcaggagagagagagagagagagagagagagagagagagagagagagagagagagagagagagagaggaggtggtgggcagggcccttttaaaagggaaggtagtgaatatgcacaggcggtgctcttagtggctgcagccgaggccgtatcctttcagaaccccaagggcaggcagtacaaatgcctgaataataacaggattaaccaggtccttactgattccggtctctttacagagtagatgtgcctgtgaacattcttggagaaaacttgtgtcttctttaagataatgtgttttggttttctgtcacttgcaactaagctgaattctgatcaattcaagaactatgcctttaaaaattgtagcataataataggtcttaagttctatttaatgtattaaatatatatagctttaagaccaatctgttttctctctggggataaatgtagtttcatttaaactatttatttgaaagactccaattaaattaattatgcatttgatttgattcaatttaacttaacaaatatttattggataattattatatgtgaggcaatttcctagaagtgccagggcataacccaccagtggtgatggtaatgtgttgttggtcagaacaccattctgtcatcccattccaaggcaggagagccaacagtttctctctgtctctctctcctccccacacatgtatacatacatacaagtgcacaattacatacacacaaacatacatgcacatacacacagacaaatacaataatactctcataaaactgattcgctaattattcaatttcaaatttaaaaaatttttttcttataaaatctaacagaaagttatcaatatcaaaaataagtggaaataaagggtttttttgatggattttagtgcttattgagcaaatatgatgaaaatccttaaaaatttgtactagcttccttctctctttttatgttttggttttctgagatagggtctccctaggtagcttggtctgttgtagatcttgattctccaccttctgcctccctagtgattggatcttggagtgggaagtggggcacaaagccctcaaacatttcattagtattataactagaatgagtgaacaaatttggtgtgtgtgtgtgtgtgtgtgtgtgtgtgtgtgtgtgtgtgtgtgtgtgtgtactactgagactctgttagcaactgcccaaattgaacattttaaatcatggagatgaggatcaagatgaactttaacaaggagtgtcaaataattccaattcttagcacttctctacataaagtatatcaaatatgaacataacaaagaagagagaatctttcctacaacagcacaatacatgagctccttttagaagatcccacgttctgaaaagtcacacgataaaaataactggtattttgtgataactagaagtagattagatcactcaaaacatttacaccactcaaaacataaagcaccaagcacaacggtagctatcttattagacagccaaacaaaactctgaaaagctgtgttaccttccctagaaaggaggaaaccaatgcaagctttacttttaagaaacaaaggagtgcttgatgaaagagttctagaaaggtagccaaagggacgtgctgcagcttaggcaaaggttcccaaggacccagtagtgtaggtttgcttgtccacctgtaacactttggaagattgggacctttaagatgtggcacttactaggtcactgggcatgttgctttgaaggaaatactgggacactgtccctaatctctttccctttgtttatgatgatgccactaggtaagcaaagctcttggccatgtactttttgccacagtttgctgtctggccacaagttccaagatagggaactgagcaactatagacagaaacttctgagactgtacaccaagctaagccttccttctttatacattgtttatgttaggtatattgtgacagtgactgaaagctgactaacacagccttggaatttgcagacggagggcctcagttttagcaggaaatgattgattccattcatttggacatgtgctttgcacagtaattctccttcacccacactctcattttgagcattttccattgcctgctctcaaagacagtcagaaatgctgaggggaatctgaacatccttccgatgaatcatctgaaggccaacagtagcctaacgtgacctacaattcctgggtgggtcatctcactttacatcattgcacagatcttacatcatctcacatgtccatcatttgggggtgggtcatgagcacagtgaggagtaatcttatttcatataacttttatcatagtgtattgtcataattatgttttagtaggtattatttacctctttccatgtttaattcatcacttaaactttatcatagatacgcataggaaaaacaaaactccataccaagatggcgcaagcacccactagggattgagatgtcttcctcgtgggcaaggggggcatgtgcaatcaatattttcaagtcttttctgaagctgtcagtcagactaggcaggagaatgaatgtggcatccacagaagcagtgctgtgcccccccacccccagggttggcttttctacttgggcgtgtgcttacatgttgtacttgggcgcacatgatgaaatgcattgataaatactgctcaaggaccagtgagaattctgtgccggactgtggtcattccccgacttaccaaatgtttgttggctgattttggactcaacaacatactctgtgtaatttcttcttttttgaactgggaagatctgcctagtcatggcaagaaacaaagtgagtgttttgtaacaggataatagaaagagatgcagaggtggaagagaaaaaaactagacaaggtgaggtgatgcttcaagaatctatgctacctaaggttttattttgcttggttttcataaaagtccagtaagatgcacagcattaacccattgtacaattaaggaaaatgtccagagagttgaaagagtgtgcttgaaatcacatgaacaccgaatagtgctgtcaggattggaactcaggtctctctgactccatgttttgtgtctctactctcccccagatcaaagcctggctgttgaagctcagtttttgctgttatttgctttaccactgatctgtgacctggagtgagctttgaaaccctccgagactattattccttacatactgaggtgttgggaaagttctccttgtgagggttgtgagctactcatggtggctcataaggaaggcctgggcaactgttaaaacattatgcaggcagtaggtatttcattcttcttccttaaaacttacacctctttacattagaagtgattgataaatatcagtgacggtaagattacaggttgagactttatgaaatcctaggaattaaaaagagaaagagagaggctgggttgtgggaaaaggagcaaagatgtttgattccaaagcaaaagacatctgggcgttaggaaatcagaagaaggacgctctgatgacagctgtagaccttgtgcaaatcatcccacaaaaccgaacaggtggcacctcattcaagctcgtctagatatttctgcaaaagcaatactttccccccgatgcctgtgttttggagcttgtccttccagtttccaattcctccccttcttctttctacatacagactttctttggtagaatatttgaggtgattaggaacacatggtaggagcaggcactgtaagtaccttctgtaggatagagggaactgtgtgttatcaccatggtactcagggcagcttagggctacgtgcaatctgatgatgcctctaggaagttggacatattatagtctttttttttcttatctcatctggatcaagttctaaagataatctaatgttttctcaaaacatttcaatctctccactactgcttcagtttggcattaccagggctgtctagacaaagttgtttgggataagaatcttgctagtagctaaagtatgttgacaaagatgttggatgataaaactaaaagcataggaaagaaaagcagcaatgctagactctaagaatggctgtaaaatgtttggttaccaaatacacacttgtattagacagacagacaccgccccccccacacacatatgttacattggagcaagctgtgtacatctctttccatgttcacaactctgcagtcactgatgaagaaagagaaatcaatcagggtaggatggtgatccatcagaggaactgtctagtgacataaaccatagccatcccccattccctgaacccacactacttaatgaacactggctcatcactgtgtgtagatgaacgcactgattaatctgttattatttgagttctttacaaacaaggtctctttgcaatctatctttatcttggctgattgagcaggaatttagtaaatgtctgagattagggaatgtatagatggaagaagggctagaattgtgcctatggatttacaataaatataatgcatttattaactaatattttattaataaggagttctgcaaacccagaaaaaatggcagtgctgcagtttgctgtgagtttgttgagttaatggaaatcatatttgctctaattccagaagcactgggcatccacttaaccccttgcagtgagaaaattcaggactaatctgaagtccctggtcctggctctgcttgtcactgctaagggatcgacttggtgatctaatttcattttgtgtttgtgcaaatgcatatgcaaggggagctggcacagatgatgtccatgcagtgatgaaatttaaggtgtgaatttgaatgctagaacaagtttctgctgtcctctgggattccactgacctctgaagatatagaccctttcatgaataggaccagtctttagctttgtttacagttgtgaccgtatttggtttagtttttctttgtagactggagatcagaataaccactgtataggacattagatgccccatggatagttattttgagtgtttaggaccttcaactgataaaacccagtgttcctgcctactccctgctagctattgacccctaaaatgtcaggttctaacaatgcccatggaatggacattcaccctgctctgtagatgtacatgaaaaaagtctatgcatgactttactgtagattttcttctttatttgaggtaggatcttgctgtatagctgtggttggcctgggaactcactatgtagactaggctgacttgaactcacagagatcagcctgtctctgcctcctcagggtaaaggtgtgcactgccacaccctgcccttgactactgaaactgaagtgtttggtcctagggttttctacaagccatttcctattttattacaattttagtaaaatacagaatgaccacaggattcctgaggaactgaaagctacatggatttaagaatgccttctcctgtgagtgtgtgtgactctgtgtgtgtgtgtgtgtgtgtgtgtgtgtgtgtgtgtgtgtgtgtgtgtgtgtgtgtgtgtgtaggccagaggacaatttcaggtgttgtttttcagctccctcacccctttgtcttttgaaacaggatcactcactggcctgaaattttcagggtagcctagggttggctggccagcaagcagcaataatcctggaatccatttgtctctgtctccccaggccttacactacaagtgtatcgccatgcctgaccttctcccctcctctctctgttttctcttctcctccccctcctcttcttccttttaatgtgagttctaggagtcaaactcagctttcataccccaaaagcaagcactgttctagttatctcttcaatgcttaaaaatgtgaccttttaataacctgaactatgggacaagaactttatgagtgtgtatgtgtgtgtgtgtgtgtgtgtgtgtgtgtgtgtgtgttgggggggtgggattctgctgcttgggaagggaatgccgtgtgttctgtgccccaattctgctgtgttgccctcaatttaaattgcgtcttctgcaatgtcctttctgccatagaaccaaccctttccagattccccctgcccctcagaggcccagactggcacaaagatttggggaaggcagtgtcattgggattacaaaagagtcctgtatgctcaaatgatctttatgaaccagccgtggctctgcactcccttttctcactagaaatgtggaagtgcaaatttgagggtgaatctcacaattttagcccttgtggtgagtagaaaccataattaccttggacgagaaaacatttttttaaactttaatattggttgatttattttcttgagacagagtcttgctgtatttttctcaggctagctccaagatccccctgcccgtcttttgagcactggggtgacaggtatgtgccaccacatctgacttcatttcttaattagccgccaccttcatacctgcagtgctgaaggtaggaaccctgaaaagctttagtttctgcccatcatgtgcttatggtagatagagatgggaacactggtttgccattttcacttgtatgagttagtgggtgaaacacttccggagtatatacgcttcactaagctgctgatggtagacttccaggcaagttccttcctgatgatgcctttaggtttgtgtaaacatcccaaaattgaactgtgtgcatgagattctgttacaatttagatttatgagaaagccatctatcttacacagaaattcagatgacatactgaggaatagctttctgttaaaaggatgagaaaattaaagagccgtggagatagctcagtggctaaggtaatttctgtacaagcactaagacgtgtgttgggttcttcagaacccatataaaagctggctatgatggcactcgtctataacccccaagctgggaggcagatatgggggtggggggacttgctggtcagccagcctaattgaaatggcaactttagggtctatgagagatgctgtccccagaaacaatgtaaagaaaaaaattgaggaagacattctgatgtctacctttggctcccatatatgtacatacgaagatgggaaaattaaaaggcaaaaattgtgatggcccagatgagacattgcttttgctatggtgtaattacatctgtgagtcatttgcataaccacatcgcatagggtgttttttaattttttttttatcaaagcaagtagcttagcagcaaagtggtgtggaaattgaatagtggcaaatgacagtgttgtcaatgttggtggcttcagttgagtgtgctggagattctaagttacaactcatactccccccactcatgatccacacttcaaagcatagagtatttatttcctgtaatcattttaccctttggctacaacttgcccttattgttcattattttggggtaactctgcttccccttgcagaaggctgtggaaaccagctgggtgaagccccaatgctggccactcagtattatcagagaccttcctgaaccttctaagatggagttttttattcctctgttgtagtcatgcagatttgtatggaaaatcaaaaagccttgttttactgcctgtgagaactaaactctccaagctagtccaagctgccagcgtgtctgcctctgctttgctccgagacataccatgatgggccttccagaaaaacttcctctcaagtccacactattcctaaaatggcaaagtttcacggctttagatattttatgacgtcttaggctgtgacttgccatggaagcctcttagctccctctctcaactccgagcttgtggagcagaactggtccttccacaccctctggaggaagcggtgattggacacttagctgtgtgttagtgccttccactaatgtaaagtctgtgttctggctcactttccaatggttgtatttgccttctcttgatttacatagatattctatatagatttctggatttacacaggctatccaagtgctcttcttttatacagacaagaacacttaatccatattgaagcatctttcccaagcctttggctttccaggataaatgcttctatttggtttgcctgtttacagatgtgttatcatctcattgaaacttatttttgcatttgtttgtttagtatgtgtgtgtgtgtctctctctctctctctctctctctctgtgtgtgtgtgtgtgtgtgtgtgtgtgtgcgcactcgtgtgtcacagagagcatgtgtggcagtcaggtaacagcttttaggagtcagtttcccctcattacaccatgtaggacctggggattgaattcaggtcactaggcttggcaacaaatacttttattagccaaaccatcctgatggtctagaggtatagcccagggtacccttgaactcagtgtctcctaccagcaaaccaccacaactagctctctcacttgtcctctgagcagatggctctaacagactgtcccgttgtaaccacagccatctacaatgtttattactctcttcctggtatggttacctaaaaaaaaaaaaaaaaaaaaaaaaaaaacccaaaccccaaaccaaacaaacaaaaaagcacatggtactatttgcaataagtgtttaaaagtcaacttcttgaaaatataagggtcataagaaaggatggggtgcatcgggtaggagagtcagaccttaaagtaaaccacaaacaattttagggcctacattgttttcttggtccattacagttcagtgatcccgtatctgttcagttcttcccagcattttattggtatttctttcatgacactgatcattctcctcttttgtttccataaatctctgttctgggaattaaagcagaatcacgttttaattcgccaccttccatgtcagatccaagtgctgtgagaccttctcatatctgtcaagcttcggtggtcaaacgtctcacgggcttaagaaactgctcaggtctttaaccatgaagaattgcctgcttacttctttcctttggagccattgttaactaggtgaaaccaatgggtcagtatgaatataaaatgtcaggaacagttgctggatcccagatcttaaaacttgatttcaaagtatcagacttgaataagtagcaataggaagaacaagaataaatatctctagtaacaacatggtagagaaaatatatcccttttcctacatgagttcattgggctaagcactgcacacacaggatataattcttttatttaaaaattatttttcattttacatatcaaccccagttcttccctcctcttctcccaccccaccccactttactcttacccataccccatctactcctcagagggagtaaggccttccttggggagtccacaaagtctgacataccaagttgaggcaggaccatacccaccctctgtatcaaggctgagcaaggtatccatccataggaaatgggctccaaaaagccagttcaagcactacagaatgtaatttaatcttcacatcattcacaggtttgctaagaaatatgtcatgggactggggtgatgtcagagtaggtaacacagcttgtacaaacagaagaacatggccttaatcactagcactgactagaaacaaaacaaaacacccacaaaaacaaccaaacaaaaagttcaatcaacaacaacaataaaacaaccaggcatggctcagtgtgtcttcaacactagagttgagggggagtgtaggctgagatggaacaatcccaggggctcattgtcctgtcagcctcaatggacttcaggttcagtgagaaaccatctcagggcaacaaggtagagtgagatagaacacaagcagtatcctcctctggcatccacatgtacgtgagtacctgcatatacacatgtatgtatccaacacacacacacacacacacacacacacacacacacacacacacacacacacttaggcatacaccatgcatgcatccaacacacacatttgtatacacatgcacgcacaagcacacacacacacagacacacacacacagacacacacacacacagacacacacacacacacacacacacacacacacaaactgcatatgatatcagtcagtattcaaacccagactgcctttgttttgagcctgctcgcttaactgttgtgctattgtgctttagatcgaatagattaggttcccagtaagtcagtattcactagcattttactcccttcagttctagtgataataatgtattccattacagcagcacaaagaatgggtcaatgtttgacccaagaaaagacccttttgctttaattagatcctattatttttttttccatagagaggatctgtagttggcagcatatttgaaatggctctttaaggtttttttttttttttctttctttctttttttttcctggtcttgaggaagcagttcaaaaacaaaagacaaaaatctaccagagaagaacacgtgcaagaataatggaaaagccattgatggagatggacctatgggccagcagagctgtgttgcatacatagcaacaggacttattttgctatgtggtttgtgaggatatggtcgatgtgtctagggtgagatacagtgtcacagatcaatacagctcctgaggtggcttctccggcagcattctgtgaagctcttaccgccacttctctggacaccaccacgctcttaatagatcagtgttttctaaagccattttgattagatcagtccccttgtaccatgagtcatactgagtttgcgataaaagggaggacctaacctcaggtaattttccagtggatgactgtacgagagaacctctttaagtcctcattggttggttacttgaacccaactactttttaaaatcatacatcagctgaattgtgtgttagcctttttgtcaaggttacaaaaatactgtattaaacaacttaaatgaggaaagatttgtgattccccacagttaaagaaattccagaccgtcatggaggggagcagtgtgacagagtcttgcattctacctcatggcatccaggaagcagagaaagcatggaaatgcaggaagggtccaggacaagactgctccctaccctcaggacacccatgacctacttccaaccaactatacctcacttcctacccatggctccatcaagggatgaagccttggatggactcagagcttgggtgacctagtcatctttggaaaccctcaaagacatccacagatgtatacgtcacttatcttctatgctgctcaagccaatcaagttgacaatttaagcgtaaccatcttgaggtacattttgtgtgggtttctttgctagctcaaatgatgtgttcctttcatccttagctatttgatatctgccacacaaagcatacacaccagcagagctgcaggggtctcacttgaatcagaacttgttactaagtacatttatgttgacttattgatctggacattctgaagcacagctggaaaatctaactttaacccatcgtgtgctttctgcatctccatctatcccactagcagcacacaaaacattttgtgaaatgtctgccaggattttacacaagttcccagaatctcaaggcatctgcattctttttcctatatcaattctagaattacagtatccatcagtgtgtggtccaggaggatacatttattaaatagttattgacaataatgcacctcattctcattgtggactaaaatccacagaacttatgctgttattcaaagtcgtctgtggaatgatatctcttctttatattattcaatttttctgtgaattatcttgtgttgggaggagtcagaatttccagttaaagatgggccttacctctgtgtagaactccaaagagttgtagctgtccataaaaacttggagacttgagggccaaatagatggctcagcacttaagagcactggctgctcttccaggggacctgagttctactctcagcatcacaagggcagttcatgacaatctgcaactccagctctaggggatctgatgccctcttctggtcactaaagacaatgcacgcatgtactacccaggtatacctgcaaacaaaacagcatacacataaaaattctaaaactggaaaagaaaatttatgtgcctgcctagaaagacagcttgttgctcttggagaggaccaggggtttcagttcccagaacctgggttgtggcttgtcaccatctgtagctccaataccaagagttccaacacccttttctgatttcagtggatacatgacatacacatgctgcgtacatataggcaaaccccccaccccaccccaccccccacaaaaccaacaaataaataaatataaatttaaagtttggggagtttttaaactcttcagcatgcagccctgagcaccttctgatctttcctgaccaaatgcctttccccaaagaggctcttgtctcattcccagtgacagcatctttgcatctgatcaaggaaatttccagctctgtaatcctcttgcagtcataactcaccggcgcccctcagatgtagacatttttgctatggatacaggttccagtcacatgctaaaaatattagtggatgactgaatgatcatcccagtgttggcttttcaggaaggtttggatggtggcttgctagtggcattttacagatatccagacttttagtagagaaaacatgacaacgctaagcatgaatgattatttttgcccctttgtgctgcccacataggaaatgaaaagcagcagcacctctgaggaatagtactgttggctcctatttcatacttactgttgatgtgatgtgtgagtctatgtacaggtgttttgggggaagaaagagaatcctattcttcctggcagaccagctgcctgagcatcagttttatttctagggtttcatgaaagacatcatccctgtaggtttatttttgggttttactcaaatgttaaggagagcctgttctgaaatatttataggaggactcaaggttttgtgagctcggtgctgtgagaaggaagtataaggcatggaagtggtgtcttgcctagtcgtcagaggtcggatggatgactttaaggcacagctggaaaggagaggtgagagcaggtcaaagattgaagttcagatgtgttgtggaaattaccaatacggagtcaggtagaaatacaagggaatttaatagggaaaagccttacttacagagcgacctagccagctggtggggcagcagtaagtacagcaagctgaagatgaaagcgaaagaaggggcggtcacatgaggatctctcactctttcaccttccctactgtcacctcaccctgaccacgccctcgcaggcctggtcaggcatacttgtagtcagcccccaagcaggtgtggctactacatcccctacacagatgggttaagtcaatatggtcaaagcactggtctttacagtgtgggagaaattaatttgtattcacaaaagactggctttttaatcggccaggacagattttaattccgggttgcaactggagctgagctttccttttctgtagttaagctgggagttggtatgccatattcttggaagtctgcagagtcacagactctacagcccaatgtctaatttagatttgcccacaaagctacttggttttttgttttgttttgttttttcgagacagggtttctctgtggctttggaggctggcctggaactagctcttgtagaccaggctggtctcgaactcacagagatccacctgcctctgcctcctgagtgctgggattaaaggcgtgcaccaccaccacccaggtgttttgttttgatctctgactgctacttggcaagccagtttcagagcatccatgggaccaggcaatctttacttttacatttgaggatatgagtctctctagatgctgaatcatttgttcagtgttgctaggtagggacaaaggcaagattctgaatacagtctcttgctacatatacaaaatgagcagtgggcatggtagctccttcctgtgattccaacactcaagaggctgaggcaggaggatcacaagttcagggccagcctgggttatatagtgagagtctaagaaaagattaacaaattaaaatggttaaaatctatagattattgtgaaacacttgggtgtgctatttttctttttaatctttaaaaggttcctctgggccagatgtacagtccaagaattcttgtgacaattctcatttagtcaacattttctttttaaaaaagtcattaaatacaaaatcaaacgtaactacatatgggtataagatggaagttttactaaaaataaccccaccccataattctaatatgtcttagtttctacttgtaaaaatgtggtcactctgcctgcctcatggactgtactgacaggaattctgagaatcatctccccacttttgtccaaaactcaaaaattgagttacaaacataattatttcattgggaaaatccatagtaaggagtttcagatccacaattgctttatttttcttgtaggaatcccaacaataagggcttttaaaaatagcaggctatgcataggcagccacaaagcctaaatgcacctaagtcaactttttcttgattaccagtaaccaatgagtaacagtctcacagacagatgtactgtgggaagcagccttgtggctgcaggttccctctctggagcaatgactcacacgatggagttcaagtagctcctatactgatgtccatatgcttaactgaattgtgtaggttttccttcttgcctcttgggtactattttaggcatagtcttatgccactatgtttttactctgtggctgtttagttcatcttcttcaacatgacaatctgaaaatatccatgctaaatggattatagctcatttaaaaagttcttacttttaaaattgcagtgtgtgtggtatgtgtttgatgttcattcgatatgtgtgtgtgtgtgtgttgtgtgtgtgtgtgtgtgtgtgtgtgtgtgtgtgtgtgtgtgtgtgtgtgtggtatgtagcatgtctgtgtgtgtgctaagtgtgtagtgtgctgtgtgtgtgtgtgtgtgtgtgtgtgtgtgtgtgtgtgtgtgtgtgtgtgtgttgtggagtacatctgaatgtgtgtatgagggtgcttttgcatgcatgtgtggacgttagagattgaattcgggtgtcttccctctattgttctctaccttcatttttgagacaggttctcccactaaatctgggtttataggtgtatgctacagaatgcaaattttatatgggtactggagatctggactcagatcctcgtatttattcagcaagtactttacccactgagctgttcccccagccctagaccaggtctcatgaatctcatttctgatactgtatgtttgataagactgttttcccacaaacaccaggatgctcagaaggaatctgaccctaccagagtggaagtgactatgtggcaggtgtcataattacttcacttcacccatgctaggtcctcctttgtacagttattttttgcttccctggggttttctgagcatcaagcattaatgtgtcttggtcttggggcatggctcagtcaggaaagtacaatacttgctgcccatgtacgaggaggaccaaagtctgagcctttgcagcctcagccagaaaagttggatgaagtgacacatgcctgtcgtcctattgctggggaagtttagaggaaggactctgaagtttactggacacttaggccagctgaattggcaaggtccagattcatttagatgccctgtcataaaaagtaaagtggagaacaattgaggaagacagctgaagtggatctctacccaacacacacacctgcacatgcacacacactcatatatacagaaagatgtgcctgcacatacacacaatacaaaaatcaatgtatcaatatagccaaccttctatattttaaaataagatgtgggcagatgaagctgccaagacttgatggcagattttgatcctttcagcctacatggtaaaagaagagaactggctgcccttgtccccagactttcacacctgggatccccacccccaccatgaataaatgtaaaaaaaaataaaagataaatttctgttgtctagtttttcagtaaactagaataaaacatgatgcaaataaaaatttggataaatctcaggtggatttttttttttaagaaccagctgatccagcagaaagacatacttgcaaagtttgcagacctactaatggaaaggaaaacattggaacagagaagtagagagaggagatgatggatgggggtgtctgagtgcttactaacctcatatgcataggcagagggcctttatgcagagaagatgcacatggtctacccagttcttcctggagcctgagaagcacccaggctgaatggggtccccttgctgctcactccagatgaactaacacaattgggatgccaggatggggacggtatgcattattttaaaacatatgtcagtgcacttgtgctttccagtctttaacattgctgcatgtgaacactgtgactaaatgcactgtggaccagagtctgctggagacccctctgtgtatgcaaaacctagagggaaatgcgtgtttccagtgctttgaagaagttcatggctttcctgagtgagctggtggtttctggggaagctgacctttgctaggcggaaaggcagaaggattattttgttttaccagtagatccccgctagcctatatcggtctttaacagtgttgcctcttgaataatgggtgcttgaggcactggggaaaaaaattaacagctctcctaagctatcctgtttctgcagaagattgagaaaaaaaataacagtttctacaagttcacatacaggtattttttttttcctcctcctcctgttcctctcccttccttccccatcaatatttgatgggtattgcaaacaaagagtacctgtgtgtagactgtgtcctaaaacagacgagatgcctgcataacaaatcccagccagagtcttttccattgccaaataggggggtctgccaaatagtctttacacagaggtcaccagagcccctaatggtgagtacacatctctccagcaggcatgtgtggctagtttcctataggattgcgtgcatctgctgtgggctctcagaacaggaaggattccttgaatccattcaggtagatcccacttaaaggcttcagaggaacaataaatatactcctttaattgccctattgattgctcctttaattgtcattctgcactttcatatttgcagctgtgtctaccctgaattcaatcagtggcacaggacaaaccatgtgtgaccgcgtgacttctttgtgatgagtaggtacaagggtctcctgctggcttggatcaatatgatcccttagtcagaattaatttaaaagagttgcctgtcgattcacatgtccgtggctttactatgttgtggtcaaaagtgatgacttttggggaaagttggcctcactgaagtggagaacgtctttggttcaatttcccatgtatctggatttcttctgtcctccaaatggggtcatggatggagacacatggacatctgtatctgtatctgtatctgtatctgattctgtatctgtatctgattctgtatctgtatctgtatctgtatctgtatctgtatctgtatctgtatctgtatctgtatttctaaaggatgtagtcatagctttaagtagaatgtgatgcattgtaacagaaatacaagatgctctgaccacagaaaattatcactcgtaacagctctttgaggtactattcctataccacgggacccagggggctcagagatgaaataactgagtgggtggtaagaaaggtaggcaggggacacaaaatgctgaaagataggaaggaaggattattctggttttctatagcccagtaggacaactattatctgtaacacatttcaaactgactagaggggtataaatgttcctagcacagaaacaatactgaggggttagatgtgtttataacctcgatttgatcaccatgtactgtatgcatggatccaattttcatatgatacctggtaaagataaattctattgtcttcccaaagtaacagtgttgcccatgtctctttgttccaagggactgccagtagtaagttaaatagcaagattataaactttttaaacctgtgcaaatgatttgggcatagaccagccacaaagctgtgcacagtaggggggtttgcaatattggtaaccctgccagttagtggaatgaggatcttttagtacatttgaaccttgaatagcttttctgatgtctgtctggcttattgtactaatgggtagtcaccttctatgctgtctttttatttcctttaaaacattacaaaagcttactcttgtgttatttggatccaaatttttgagattggaacttaattaattttgtctaataattgggcataggatcataggctcatcactgggcaggctgtagttggcaatcttgagagggggattcacttccagttcccattattcagtcaagggaaggaggccatcatcatgctgctcatctattcctgtgccatcagaatggtagagtggcctgtgccctggaaggtacctgttcagagaaagtgaaatcatgcacttcatttttttttctctagcttatttccaggtgaaaaataccagagcaacttggggagtttgtaatgctcaggaataaatggtattccaatgattaagttaaatagtcgaaaagttctatttttgctttctcccatgatgaaatttgcatctctgcattttgaagcaggtggcatgtagaagtcactttctttctgggccttgcagcactaactctatccttcagcatattctaagactacagcattgaaaatgcaaagcctgggcaatacttatagttcaagcttcatgtttctcttatgtaggaatttgcaaattccaatacttttatatgttttgtgggaatattttttctagaagactgttgaagtcctgacaacatggctacacaacattgtgttttaactatggcacgatgcaatctgatttccaacctactgtctccagccaaagctataccaccagtattattctatgcactaaggactttaaagcattttgaggttggaccacaaagaaatctgagtgttttcttacaccaaggatcagttttcctccgatgaacatcatgtgtagcacataattgaattcaaagcggcaaggtagaaaactctggtgtgaactgataggcacaagtgagagttggagggcagatgcagacacagaaacagcttagttttgtgtctttaggacccagaaagcatgtctccatactccagatcaccatttgctactgctatggaaagtgcatgcttcaatatggcactgacccagcctattgtaactgtagatttccctgcctgtttctatctgaatctcgatttgctgagggctctctgcttctcattctgtgggcttcacacagattctggcactcaatataaaataagttaatatttactgaatgattactcttgataagattaatatactgagcttgtgcaaatgactgtaacccctttttctggtttgaaaacaccaacgtggtttagcattctaggcaaacagtggatcatttaagtgagagaaagaaaaaaggtcaaccatttgtttaaattatagaaatgtcaaagttgcttattcattcattcatctctttattcagtaggcactgtgctaagtcacttgggaataacacactttctatggttattacagggagggaatgcttacaattgatgaatactagagggctctttccaaagaatgaacatttataatgtgttggggatctcagaaagcttttttattgagagttttgaaggaaaaactaggagttactaagaagcacagagaaagctacttaagagcatcagcactgcaaaggcttggagctagggtcagcaagaggattctgggagctcaagtcatcattatgcatgcttagaggaaaggtcaggagggcatcttttgggcattccaacacgtttttcaggggccaaagatggcttagtgaataaaggtacttgtcaacaagcctgataacctgagttcaattctagggagccatgtgatagaaggagaggagttcctgcgaattgtcctctgatttacacacacacacacacacacacacacacacacacacacacacaccattaaataaacattaataaagtttcaaaattaaaatgcaaacacaattaaaatattttgagagacatttgacaagtatgaataaatacaattatatatggtttctttcttcatctttatttactttaaaaaatttccccattccaagattactgcatagccatggagacatgggtaatggaaaaaatagttacatggagtattgcccagaattccctccactggagttctaccaccattataatagtctgatatattttcttctagatctctttatgccattaacagataaaatattcttatagattctgacatatttgcatgtgtgctgcatacatgtgtctttgtgtgtgggtgggatgcacttgtctatataggtgtgtgtggagctgggaggttgatgtcagtgtcttgcccaggtactctttcattttgctttatcaggaagggtctctcactgaacttggtgtttgccatttcagctggactgactagccagaaaacccctgtacctgaagcactggggatccagatgtgtgctggcacagcagggtttttacatgagttctggggacccaaaagtacttcctcaagcttgtacagtaagaacattacccaataagccatcttctctgcatcctttgtcagtatttcatgtttctagttcatacattacagaaccagaggagtcaaagtcaaggcactctttggtaatggatcgttaaatgacttcggtcatggaaaggaggaagttcccatatgccaactacatcctacaattctcacattaaggaatgccattcaagccagtcagagtgtggaggtgagaagtccctgtgggtgccactgtcctgtgggtgccaccatcctgagagcttccttttgtgacagctcaggctgtttactcagcatctgatgacccgacgagtcacctgaaaacccacagatgaccacatgacattcttaagtttgcatttatggaccagtaccttttattggatttagtgaatcatctctttctatcttcttacctttgctattgagaggtagactccaaactctatcctcccactggagttctgagtactgggactgcgcatgcgccactgtagatggacactttttgccttttcgccagaaaagaagtcaagtgccatgcaattttatatgtatttacttatcatttgttttatttatttgttattttaagataggacctcactgtgtatcactgcctgacctggaactctctgtgtaaaacaggctgtccttgaactcacagagatccacctgtctctgctgggattaaagttgtgcaacaccatgccaacctacttatcatttattttgttttgctttttgagattaggtcttagctattccaggctgggatccagctctctatgtttctgaggctagtcttcaacgtgattctcttgcctctacctcctgagtattgggattatagggcatgcaccaccatgcctggcttactctttgtgtcgaaagggttactcccatggagccttttaaagatgaagcaatggaataaaattgaataatcaaatacttacttctttataatgatgaaaaataaaacaaacgctgatcatgtctgtttttaaaagaacactatcatggcaaatcctcaccctggaagcacttatgtgctggctagtgctttgcctctgccaaggctaatttaggatgttatcaaacatgagacctgactcacttgatatgttccaaacaacttaatgtgagatggtcaagataactattattggctgttttaattttgggatggagagttctgaacaggttgacatgatgtttctgtagcttagatgcccttgtacttactatacagttgaaaatgaatttaaactcgtgaccctcctgcctccacttcccaagacctgggattgtagggatgtgccaggttcaagatttattatcaaaattgagatgggtctgggaatatggtgcttggattcaaaagcagaggataattttgatatttttttgatggtgttgggaatggaaatccaggtcttacaaatgctaggcaagctcctgacctctgagtcacacccagatgaaaatatatttgtatgaatctgacattgaaaataattttaacacacacacacacacacacacacacacacacacagagagagagagagagagagagagagagagagagagagagagagagagagatccactcatttaatcaaaataattactttcaactgtgacctcctgaatggcaggaaatgtatctcagacaaatactctggataagaaataaatgtcatcctcagttcccagttgaaatgttcaagtgaggccacatcagaatgcctagagacacttttttaattcagaaatttgcaaagaaagaggaaacaccaaggttttgaaagggaaaatcacacaactaagattgtgtctatgatttgcctttgactgtcaaatgttatctgttgcttaaccaagggaacagtaatgttcattgtcctaggaagatgggttcagaatctaaaagtacacacaatagcagcaactggtggtcctagggaaccaaatctaatgcctcaacatgccaagtgtcagaagtagagatggatgtttgttctgtgatgcaattatttacaggggacacactcttgctgggatactcactggtgatcttctgtcctcagatgcttataacagtcctgctttggtgggatgtgttgtccttaggaccatgagtccccagcgaaattctgggaagcctgtttgaaggttcagggttggaatcaggtgaattattgatgagatctgttatcaggcacatgggggagaccctccaaaagaagacagccaggtagatgcaagtcttttcccagtagcttcagagcattccaataagccactggctagagatcaggatgccatgaggtactgaagtaattgatacacaggagccaattgttaaattctctgggcattcatgtgctgactgttaaatatagcaactatctaatattaaattatataagttcattaaattatattaaaaggaaataacactaagtgattcaccacttaattttttttactaccttcctttcatccttgcttccttccctctttctttctttctttctttctttctttctttctttctttctttctttctttctttctttctttctttctttctttctttccctccttctttctctccttccttctgtccctccttctttctcccctccctccctccctccctccctccctcctccctcttctttgagtgtttttactacaggtcttaactaggtagctactcttgggtttcaactgacatgccttctgccattgcctcgtcatcctgagattacaggtgtgtaccaccatgcccatcttgtactccataaaaaatgtgtctgactggcacataaaaatttaccagttaatgatcttaattctataatcaaatatcctctgtaaggcccaaaggtaacaaaattcaaggaagacccagtggtgcagagaagtcagctcctgaaaccctcaaatctccaaagttcaatgttcaccgggagaagagctgctcagagcagccattgctgtttgtgtttacataaatagcaagggcaaaggagagcagcagattgaagtattctacagttttgtgtttccctaatagagtcacttcgactctaatgctcttttgcaaacatggagttgtcctggaacaactgacacattaggatgcagtgtgaatgaaacgggagccttacacttgtgcatgcaaaacttcacagaaactagcaaaggcccctttctcaactatctgctggccctttcgtgggttagagctgtgtgacgagccacacccatgcctctctgctggtacagatgatttcaggctgccttctttccaggactttaagtaacccacagcagcgacctctggggcatttgcttctataaaccaacttttatgtctttttcattatggaaagcatgtttaatctgccaaataaatggctctttagtttttgtatttcttaataaagtagcattaaaaaacatgctgacattttaattaagtctccgtattcctatgttatttgctacagatgattacttttcaggacagtgtgtctctagtgctattatcttcactcataagctctgtgtattttagtatagattttgtatgccaaataactgtgtttattcagtattattttagaaaggactaacaaaatatatattgatagtaacattacaatttgcaatctatagtgttattttttgttattgcattattttaattatttccaaggtagatatttggtataggaatcaaaagtgagagagtaaaagatttgtccagagtcaaaaatcagccagtgccagaacagaggcccaatccaagttgatggttctctggcttgtcagctgcatggagcaagaggagaggatgtggtctcctctctcccatccaagtactaaccaggcccaaccctgcttaacttcctagatcagacaagatttggtgtgttcagggtggtatgggcgtagacatggtctcctttctttaacactgtcttgtatgcatgtattgactagccctttgtggagacaatatttcctgtagcctaggggaatgttgttgactagtcagtgaattaaaaacaatatgttaatattttaaaaaatattatttaaaatgttgtgtctatatgtggatatgtgcacatgagtacaggagcatccagagtcatcccttggagcagatgtttgtgagccacctgacatgggttctggtagctgaactgggattgtctggaagagcactgaacactcttaactgcccactcctctctccattcccaatacagtaatattaaaggaagggttctttgtttttggtttgtattttgtttttcaagacagggtttctctgtgtagctttggaggctgtcctagaactagctctgtagaccaggctggccttgaactcacagagatctgcctgcctctgcctcctgagtgctgggattaaaggcgtgtgccaccaccgtttggcagagaaaggagtcttacaagtagtggcagattgattcctaaacagtgaaaaagtgaaatgaatggaggttggtgatcttgttagccacttacaagaactcctttttgtgggttgtcatcagcccctttggattctattgttttggaatttggtaactttcttcaccatcatggggtatatgtagggtaaacaggcatattcctcatttcttttcctacctttcctttcctttctgttctctccctgccccgcatgcccttttgttatttaggtttgattttataccttttcccaagacaaatataattatcaggagatggttgcattgaggaaatttggtaataggtttattgccatgagtaaagttttcaagtttttgagcttcttcaagagaattatgatggagccaaggagatgactcagtggataacatgcttgttctataaatgtgagcactagggtttgcaattgcagcacccacataagaactggacaggcatggttgcccccttgaaatctcagtcttggaaggcaagacagggaatctccagggcaagctggctagcaagactagctgaacagaaaccatgttcagaaaccttgcctcaaagaataaaatggggaggcttctaagaagatatccagtgtcaaccactgcatgtagattcattcacacacatgtgactatgaatacaaacattcacacacatgactcacattcacatgcaaaaaagagaaaaatgatgggggatttcctactgtatgatgtgaatatatgtttctctcattggttgatgaataaagttgttttggccaatggacaagtaggatgtaaccaagcaggaagtataggtggagctaccagactaggagaatgctgggaaaaggaatgcagagagagagtcaccaggaagatgctatgtagccactgaaggagtaacatgcctgagcattatgggtaagccacagccttgtgacaatacatagtttaatagaaatgggttaataattaagagggagctagggaataagaagcctgagccattgggctaaacagtttataattaatataagactctgtgtgttcatttgggactaaatggctatgagaccaggtagaacagaattttctttccacagaaaatggactcaagtattgattttgtaagaaaagtaacttctttgagtgaagaaaacagctactctttagacatgaaggaggagcatacacactgtttggcaaatgttcattgttaactcacattgccattgctcatgggataacattaatgttgcttttttgctgacacatattttctctcgatctggaatgctaattgtgtgtgtgtgtgtgtgtgtgtgtgtgtgtgtgtgtgtgtgtgtgtgtggcattaacctgattcactaggggtcttcaactaacttattccaggatgacaaattgattcttttaaagaatttaaattttgaaagaatctgggccctgtttgttgagctattatactgaggcagtcgtggtaatttggaaatttgtacatgggaaatgcagttgtaatatgagattaatttgagcatttgcattttgtcttgcctcccatgccagagactcaaatgtcaggatctgtatcattcctgaattttcagtgagccagcaccctttagaggaaaagacactgtgagagataacactatagcataacattccgctgactgccatcagttatcaacttgaccacatctgtcactgctttaatgctgtatcacatgaggacaccagctaaacttcatacccagtgacaaacatcagtgtctcttgtcagtgccttaggaagttttttgggggacactgggaagatgtctcagggtatgaaaggtctttctacaaaaatgtgaggacttgagtttgaatctctagaacccataaagagtcaggtatgtagagtgaatattttcattaactaatttttgcaattaaaatataatacgtcattttcacccccccatcttccctccagcacccctatcagatcccccttgttacctttcaaattcatggtctctctttttcttttaaaattactattgttacacacacatatacatatatgaaaatgcatcaacatataaatacgaagtactgagttcattttgtgttgtttgaagtatgtgattttaggcctgacctcctggcattggaagattgtttctccctttcttaacagtcttgccagtatttctttgtctaggagtgggaccctatatgatttgcagcgggaacatttgtaactctagcactcctatgaggagatgggaggtggagacaggagaaaccctggaagcctacaggccagctattctggtctatgtagtggaaaggtaaccaagagacgttgtctcaaataaggtagaaggcaaggatcaacacccatggttgtcctctgacaactacatgagcctgtagtcacacacacaaagacaattgcatgtgtacacacacacacacagagagagagagagagagagagagacagagagagagacagagacagagacacagagagacacagagagagacacagagagaggtttcagaaaggatagagacaggccatgatattctgtaatacaaaggaactagaagagaggatattgaatgttttcctcaaaagaagtgacaaatgtttgatatggtaggtaacctataactagaccaattcatgatatatataaatagaccaaaacatcacactatactccataagaatgtatacttactatcagccaagaaaaatttaaatattctatgtaattttggaaatagctctgcatcagaaatttaccatgagaagcttcccttcataactccccccttcttttccttgacaaactattatctctccgtgtgcattaaactaaaaggacccaatgcagtggactcggtgttagtgcagtggccacatcactaaacagaactggagattgtgccttcaaaagcagcctgatacatggtagccatgcttagggcacttgtctcatggtcctgatggaagcctcagagagcacttagcaaccgtttctagcccaggctatctgaaatgcttagaactgagcttagtcttcccagaggagggggctctcaggaaagagacccatgcattcaagacaattgccctgtccccctctgccgtcatcctgaggtgcagattatctggagtgtgatgctttaccaggtgaatgacaccgaaggcggtatcaaacacatatctgttctgcttttgctgccctgtgcctcagcaggcaacaagtgaaataaaatgaaaacatttagaatgcaccagttgcaggccaaccatttagtggttctaagcaggaaaccaaagcagggtcaactacacagactgaaggtatttggctaggaggccagtctggtcctctctgtctcctttctggtcactgtgccctgggatgcagactatcgaaagcactcactctgatgcgtgctcctcatctccctagcaactgcaaagacactgtttctaagtggcatcattgtctgcaacaggcccttgaaaaagaatgaggatcatcacctccaaagtcattcctgatttctccttggtgaggatgagagcgtcctccgtacacacgagtcgtccatgtgtgtgaaatcacgagaatgcaatcgactgtgggagggaggcgaacagcggaaggatcacacatttcacctcgtgtctctggtgtctggacccgcaggccatgggtgctgtgagtcctcacaaggacagcccacgaaggctggagagctaatgaacagtcactcctttggaagccatcacttccagtctatcacctactcagagttattagctgagcatttcttatgtgtccgactctggacccatgtcagagtagcgaacagaagtggctcttattcctgtgggatttcccttccacggcagaggcattctcatcttgatataactaatgaatggggcctagccaaatgtctgttgtgtgatgggtggttggtggtgaaacacattcccattctctgcttgctagattttagtattttagatgacagctgtgtctttcagagggcttgattgacacctgaaggtctttttatttctctcctttaagattacattttattgtgtgtatttctggcgcacgcgcgcgcgcgcgcgcgcgcgtgtgtgtgtatgtgtgtgtgtgtgtgtgtgtgtgtgtgtatgtgtgtgtatgtctgtgtatgtgcgcgcgcgcgcgcgcgcgtgtgtgtgcgtacaccatggctcatatgcggtggtgaggggtagtgagttctctccctacaccatttgtgggtcctggaggtcaaactcaggtcttcagagttggtggcaagtggctttatctactgagccctcttgtaggccctgataggtgaaggtctcagagaagtttgctgagatatagctgtgccttgatagaaatacacttaaaatgcctggcccatgcctttactcagtaggaggtgccattataattgatgcactgcaaaccacctggtatttagcttatgttacacatatttgcaatttatctctcatttctgttggccacacccatttccattagccttttcttcattgtagctttatgaataggcaatggatttagagagtatccccttaaccaattaatcactggggaggagcccagagactgcacttcagcacacacatgcactctagttgatgttctcagggtcctctatgaatgactgtcagcaaattgcaagtaggtattaaccaggaacagggcactttctgtgatcatcacatttatagcaaagctgggaaaataataaccaagccagaggaaacacaaaagaatcttttgataaaaaccaatttgagcaaaacacacttaacagatggacaaatcctgatttgcctgctaagggcttctagttcctcttttaaaacagcttttctccattacagaccatctcattactttattgttattatgccatggaagaaaatgctggggcaaccagtcatctaacgtctatttgcaagctaacctcttgtgttccaaattaggtgtggtaggtgtgtgagtgtgtgtgtgtgtgagtgtgtgtgtgtgtgtgtgtgtgtgtgtgtgtgtgtgtgtgtatgtgtgcaagagagctagggagagagagagagcttcagctctggggtgcgtttgtcctttcaataaatacacatcctgctctaatgtatactttcccaaatgttcactattggcagtggtggtacctgagattctgagtgtgcatagtgcacaggccagaccttggtctggccgcatgagattgagtgtggtgcagtgtgatgcaaattcacacccagctctctgatgatgcttctcccccccttacttccctctctttctttcaaactaaatcaagagatactatttggaagtgttgggaaaacacatgtatttgtaagttatttcattaatacttagaaagtagcagggaagaaaacaaagctattaaaaacctttcaagactttacctaagcaaacatacaatcctttggagaatttcagcaattgctatagtgcttagaagatctggagactttgggatgcctttgattaatatgtcagaatgaagatcattgtcaaattcagttgttagctattaaagcatctttgtgggacaagtatctaaggggttataattatgacacatagtaactgtggtttaattccggaaatacctaagttttactgataacaatgtgttgttgactagatctgacactcccttccttggacgccatcaaatcgctcatccttacaaatgccagcgttatggtttgaccacacaacgtcctgccccagtttatgtgtttgaacacctggtctctctatggtcctgctgtattgggaggttgtaaaactttggggacgcagagcctagaagccaggcttgagggggttagtttagctgtttcctgcctgagctccctacctcctgatcactgaggggtgcaagccatgtcacatgctcctgctgccacagatggaactcctgataccatgccttcctgctgtgtcctgtgaaccaggatggaagacacatttctcttcctctgtctgttgagtatttggtccagctgtgaggaaaacagcgatacataaaatggaaactgaaaggtgttgcggagatctttggaattgttttgtgagaagaatgtggaaaactttggagctgtgggctagataatccctgaagtcctataagcagagtctgctgggcaatgccgggccggggttagacaggcaatgtgctgatggaaatatgaacagtgctactcatgaggtttcagagaagaatagggactctatcagcaactgtgctggaggccattgatattacatttaggccactcatgttacactcatgtgactcatgtaatattattcaaagaatctggcagtattctgcccaggtcctgatgacttgactgaggcagggttcagaagtaaaggattaattgatttagcagtggcaatctcaaggcagcgcagcattcaggctgacacttgttggctctttgtagactttgggtgggtatgatgtgctgctgtgggctgactgattgcaatgaacgtggcattttcatgcaggattttgattgcagaggaggctgtgtgtggagagatagacagtgtatgaaaacaggtgctttcccttcagttttgctttttttttttaacatgctgtgtttaaaaggcctaataaaatagggaggagagcacccaagtgccactttcatgtgactagctaagagtaaaataaaaggctccttcctggtgcttctgtgtaattgcaccaggttgttatctattgatttgcaaataggagcataaataagtttcagagagaagattgatgctttattttgaatttttggagtggcttagatctcatagtctctctgtttcctgcaaaaatgctggatgtgtagtcatacttatttcaaatcacttccgaaatattcctgttgccatagcagccaaggctgatgatggaattgatgtaggaagttctcagaaatgagatctgtcctggaaatctttggaatcatttgagacagttagatacgtgaagttctcagcattgattctagcaacagagacatgagtatttttgagctaaaaaaagtgcatgtatcatgtaagaggcatgcatgatatgttaagtatgtggcagttgaacagaatcatagacagtgccttcgttttccagaatagtgtcagttaacaagcctgaacttgtcagagctcagaaagggccacgtaaggatttcccaaactcctggttcagcttacatattgtcctttcctggggggcttctgctttgtttaagcttgtccatagtagggttgagatcaaagtggatgaggaatgcttccttgtgtctatagaggtccctgtggcggttctactcccccttgtagtttcagactgcatacctcttgcttcggttgctgagctgtgtgtgcgagcatcccaaaatgtaatagacacatctcagtggactttctcacatctccttatacattctttaattatttttctatttatttagttatgtgtgtatatgtatgcttgaaggagcatgtatataggtcagtggacaacttagggtagtgggttctttccttctgccatttgggctctgatgattaagctcattatcatcaccaggctttgtggccaatacatcaacccactgaatcatcttgcctgaatgaaagcaactgacctccatgatgatggaatttccttagaagatgatgagatgagaattctggagacttggggcgagttacgttcactgatattgccctgcagagtagcagtgttggctctcctgtgggtaggtcttcttaagtgtttgtttagtcagcctttgacctattcaggaaagaaacaagctctttcaggaggagtctttttttcggtctctttcttaggttcagcaagcaatttctcccaagttgtgtcttggttcctcctcccacagagcacctcgctaccgatagacaggagaccgataacaagtgttctgagtgccatgatacagtcaaatgaaggtgagataaggaaggcctgtctagagtggggacctgtcacttggggaacttgtcagatggggatgtaagtagtagtgcatgtcagtttggagcccgtggcttgaatgatctgttctacttagaccctttaagtgcaatacatgctctgtctttgtagtctgcactcagaccagtactcagattgggaagctcctatcctactttcaacatttttctcttcttgattatctatttacacccatcttcccaggcaactcctgtcaagagattcctttctttcctttgttatcccaactgagtagtccggcctcagtcaagagtcttcccttatgttctattcgtcactgttccttcaacctctttgaaagcagagttggtgagagctgcggcttgatttttggatctttctttctgttcaattgccatttagtagatgagtttgttggtagtctgactgaccttttcagaaaattaaaaagaaacaaccttaatgatcagccttggtgttaccggcctgttaccacagctgcttgggggatgagccagtaggattgcaagttaaaggcctacttgggctacagagtagatttttagatcagcctgggcaacttagagaaactctgtctcaaaataagaattgcaaataaataaaagagggttgaggagacagcttagtgttagtgtactcacctagcgtgttcaaagccttatctacagtctccagtcccatcaaagcataaaccaaaaatccctagaacgttattaatatttcactttgcctttcatagtgaaaacatacctgtgttacaatatttggaataagtcaggcattcctttctcacatctgtagacatactcagttccaagcagatttgtgggtatgttgccattctgaggcagtcctttggttttggcaagtccattgcttttaggcctctgggggcagttggatgacagctgcccaggatatatggtggaataggactacttatttcacaccagaagagcaaagcagaggagacatggccagggtcccactgtccctttcagggccacattcacaatgaccaaagaccacacattagttcccatctctaaaagatcccatcacatcctaatagcacctagttggataacaaactctgtaaaacacaggctttggggaacattccagatctacactatagtaatagaagatcaggagtatgagttaagaccttgttccacctttgataattgccaaggcttttctttcattcccaatatactctgactactagtgcaaatgtgtacatgcgtgcatactctctgtctctctctctatgtgtctgtgtctgtgtctgtctgtctgtctgtctgtctgtctgtctgtctgtctgtctgtctctctctctctctctctctctctctctctctctctctctctctctcatttcatactgaatgtgatagttctcagtagcctgtctcagctaatcctgtgcctaaccctgcaggagcatcagaagagggagtttgtgggagcagagttgcttctctatcatttgactcttggactgcattctagtggaagagtctctcaaggtacaaaacaactcctgtttcattttaaagtaatgtgatttacacacacaaggaattaaggcttttcagttgtagcagttatggagagtgagttggtaggcattttctcctttactgttgatgttgagatttcaagccagaaccattcctctggcactttgctttattattcctttgtgctattcccaccttcctccttcctcctgtctgcttttccactttgctccaggcttgttggaggtgcttatgtctgcttattcactgttgcatccttagtaccgagtagaggacctgctgaatttgttgctagaatgggattcatattctgtagggcagggacctttaaaagttctctggctgtaacagatcatcttgccatttgtcactgagtttttctgacacaggtatttcaaatggaaatcaggctttgttgggaagggagtttttgagatataggtttataaactgtttatatggaggcagaaataatctgttacaaaatcatgaaatggtgagtgaaataaatctttaaaatatgatttaaattactttattgtttgtgtatgtgtgcatgcatgcacgtgtgtgtgtgtgtgtgtgtgtgtgtgtgtgtgtgtgtgtgtgtgtgtgcattttttgagatcatgtatcacagtagatgtgtgaaggtcagatggtaatttatgggagtcagttctctctttccactatatgggttccaggaaacaaactgaagtcctcaggcttggcagcaagtcaaggacctgtatctgctgatccatctttatttgctgcccccaaatctttaagattcaaaactcctgggtcgaggaatatagcttggtggtaaagctctcacctttcatgtgtttccctatgtccaatgcccagtattgttaataaagtaaaaacaaatcttgaagacactgaaccagcagtgaagtgatgaattccactctatctggttacggatacttgcctttcactctagtctaggtcaacattctgattactttggaagaaatcattgaaaaattgttgagtcaagggaaaagttggtaaataacattatatgtgtgtcacaattgtaacaaaattgtgaaggctggatgtcagtatgaggttagtactgatgttctaacccacacatatgtgtattacctggacatagtcttcctatagtctgttcagtggctgtctctttattcttagtgctgaatgacttgcctgatgagggccaggatcagatgactaggtttcatgacagttcccttgtgcactaatggcaatattctatcaaatctgattactagaagaaacaaaatctcaagcaggcattgtttaccgtttagtttggtgccacaggaagccataattaaatgtgtagtagacattcaaatcatcttaatcattccatcagcccttggacatgaatggaatcacaggtttatgtgaaagaagagagcaggctgagcaggtttttcttctcctcacttgtaagctagcccttgaagacttgctgagactgagaccagccatgttgtctttgcagaagttgttaggtgtggaagtgccctctttaatattaagaaaaggtttaacttgataaaggagtttatgaaaccctgactttttaaacagtagctaattaaaaatgaatcctattagagttgctaagtatatattatatccaggaagtgaagaattaatgtgtctttcctgcctattatcttgctgcatgacaggggtcattgtatcagaatcaggttgttctcagacagctccatccagactgtgtgctgcccagccgtgtctgaaagcttagttccacggaggccaccgactgagatgacattagtgctgggcagagttggtttgttggttgctgtggtgacagtctcaaactgttaacactccagagccgaacctccccagcccatcggaatgaagagaagtggcagatgattagggcactggactccagatacactttaaaaatggcacccctgtggattaatatctattcccaacagcttttgactgccattctgttgctgttgacatttggcttcctgtccagcatctctggtagacgttcgtttcttcacctcctctcacaacattgaactatcgatggtgctttgttcacagagttcttgtgccgctgtggcccatgctcactatctgtttgctttgtcctgctgcgttagtggtagcttttcctcttctctactgcagggtactctttcaggcccttctctttccctttcctactctctttaaaatcctttcgtcctcctcttctctctctttctctgaccttcactgccttcttctctttcttcactacctgagcaccgcttacatccgatggtcaaaattgtgtccctggctcaggctttcccccaagtaacaaatccacatctcccaatcccagatgggaccttcccaggctactttgtggttactttaaatctaccttgttcaacagaaacttcgcatactcctcctgtagtttgtgtaactggtacagatctgttcagaatccatctttcagagccttctttagtcattgctccctcctctagactctctacgttgacactcgttgttttgtacgtgatcctcacatctctcttatgtcttcctttgtcatgagaatactggaccagtcggctattgcctgatactttgaatttccagaacagcttcctacctctcagccattaagttaaagacataaacttgtaaggtcttttccagtctgagttcaatttgtctttccagcctcactgttacttgtccttacacactgagtgtccttacacacttatcaggcatggcctgtgctttcatatggacttggactttgtaagccttttcctttaattgttacttctttatttatttgacccaggtctgcttgatcatgttgacactaggtctagctggtcttgcatttgcaatcctcatgtgtagcccttccaagtgctagggtttacagacatgcagcatggttcttggctgtgcaaaaaattttctagtttaacatttacctgagaaaatgagtggtgatatttatcgaagcattaaattcattacagatcatggtggtataggaaccttgcaggcacgcgcacacgtgtgtgtgtgtgtgtgtgtgtgtgtgtgtgtgtgtgtgtgtgttactgtgaaaacaaacctggggctctgtgtttgctagataatatcttactcttggaatacaatctcagccccttatagtgagtatttttgaagaggaacatttcctctgaagcttcaagatcattgcctctgcgttgtcttttaagggcaatgattcttttcccttggggtggaaagtatttgaagttgattaaatgttctgccctggcagagtggctagtcccactattgacatgagtgcttgtcacttctttacaggtagagtgctatgaatagcctttagttctatggcctgcatggttctgttgaattaaatgaatcctcttctctgcctactgtctgttcatctggttaacagaatggaaaagtacacgaaagcgtacaatctccagtgtcacctgctaccaggcatcatctccaaagctcatcttaaagaatgctatacctcattgtctagattgtatcactttccaggaagtaactattttcctaattgattctcttttagtctgctttttatatttttggaacttcatctctatagaaagctgtagaatgggacatctacactaggcacagtggctggtttagtggttatactagaggcaagaactccaagatctatgcaggactgttggaaatgtctgaactggaggggagggtcaggttgtctctaccctcacctaagttgccaccattgcattaccataggaggcaaattatattctgtctcagttttccctttctgttaagctcccaaagttggtgactagcagaagtccctccaggattctttatagcacactgtcttccatagcttctaacttctcctgtatatttcaactaattaagaaggcctaattaagaagaattatgagccatgaatcaagatggtccctacaagctctatgagactcatttacaaatgactctcttcctgaaactgaacttgtttcagggagcttagttctttctcatttgtgttcttgaattgtgtgcaccaactctactcttaaagtgtttatgttgcttggcctgatctgtggatgtttatatcttcgccaatctcagtttcttaagtacatggaagtggcatgttttcactgtctttctctttggacattctttcagtctggcaaggagatatgaccagcataaataaaatgtgagacttcactctgcagtgggctgcatgcttggcacattacctgggcaccctctgcctgagaagacactttggataatggcacacatattcaccagtctttaagacataatgacaaacaataataatcaaagaaaaagaggtcatcaacttgagagtggtggtgggaggtatgagatgggtttgagggattgaagatggaagattctgtactgtctttaccccttagtcccaaataaatacacagagtcttatattaattataaactgtttggttgatggctctggcttctttttggctagctctttcttaattattaacccatttctattaatctatgtatattcactttgtcttgccttactggtgatgcctgaccgtctttctcccttggcagctacatggtgtctgtccttagactcatctctctgagtctctcttcccagcattctcctagtctggaagccctgcctatacttccagcttggctgcatcctgcctgtccattggctgaaacagcattttttatccaccaataagagaaacatatattcacagcatatagaaggacatcccccatcaagagttgggtagctgggagggctgagagagattgagggagaaaaaagagaaaggaatgagaagtaattctattttaattaggaccataatttttgaaaggataaacacaaaacaagtttctgtgcacagtgaaaatgaatgagaaaccaacaaaagtcctagaatttatattaatgtgtatgtgattgtagatgtgtagtttgtaatccatgtaactattccatgaaatgtcagctgttatccctatgaataggtaagaatactgaggttaggagggcttatataaattatccagacttacaaaaactggcaaaacggctatccaaatttctggtccagttgcatgttcaactctgtagcctctttgatagcctttcacctaatctctctttacatatttatgtcaaggtatttaattaatgtgcaactgaaccgattcttattctaagagagttcattttctatttaatcaatcaagaaacctaactcaagacaagagcagacaggatttccttcctacttagcatgagcaaaacgagacagatgtttttttttttattatgcactctgagatggtgtcatgatgaagagatatttggatctcatataactatgctaattttctatgctaatgttctgttttggcatgcctttatcagagaagcccttcacatatcttaaacattccatctattaaccagtgaaccatgtcggagggaaatttgcacacattctttgtaatgccacttaattttcaaatcatctgaattttacatttgggcactggctgttctgttgcttccttttgaagatcttgcctgtagtggtgcttggtgaaatgtgattacatcatgcatccctaaatgtacaggtgtttataagtcccactttccaatgtgatttttgaattaaaacaaagatttgtagacatggaagaagctaaccagactataaaagagttggaagcagcaaatgcaatattgctccatcttttgcatcaattccaatgactttgcttctgtcaagaaaaagattcatgattagaggattaactctgatttagaataaatgatgaataatgggtaatgaatttaaatgacagcaaatagttagagttgggtagacaagggggacaggtagaacctcttacagaaaggcagacttgtgctgttcagatgtgagggctattccaagatcagcatcccttattggtggacaaaattggtgccatgactcagttcacatatgaagccttttgcaacccaaagacagcaacagcagcaaggaaccaggacacttgcaggagcagagtgggttgttgcattgtgttgttttggttagggttggtgtctagtggttggagaatgttatccttgggagccatccttgagttaactgtgctctataatgacttcctgctgaatagctggaccacaggggcagagaaatgcttttgtggccagaatttccaatgaagattgaggctttgggcagatgacaaggaagagaattttcatgacttctattcataagattttataatcattaggagtccatggcttcagaacaggatgagccctcatgctttcctgtccctgagtgatggtatgtaaccttttctttgcaatcaaacaccttcccataagtagtgtcaggacatctggaggacagcaccttctgctgcttttctcttttacatttcagtccagaattgggggggcattgtgagagaatctgctgaagtctcaagactccccggaaaacctattgtgaggagaaataacaagcctactgctctacctacctagagatagagatctctgagccagatgcatgagagggagtttcagagataggaggacgatggtgagagatgtttgactctcttagaaccacagtaattttcctagttgatcctctatttggtcagcctttgtgtgggtctagagtcaaatcagttgctgtgttgtctggggaagtgtgctgtgttttctcctggctcagttgtcacattcctacaacacagatgagtccctttatgtaatgaaattccaaccaccgggggcacataaaatatatgatctctcagtgttaattgcttctacagtgccagaatgctgcaattcctcttgtagattttttttttgctatttttataagtttctccatctataaaatacaattgatatgtaaacgaatagcagcagtagctaactgacatgcagctctctaggtgagcttctctgtaaagtagtttgactggtatcatagatcttgatttttcaataaaaaaatatggtcaccaccttatttctgagcctgatagttacttcttttagtccaggacagagggacctaattccactagtgcatatgctatttgcctagtccaactctcatgtgtatgaatggaactggagacactcaggcaggtttttctttatctaaggtcattacgtaagacccaatgctttgtgacgtataggacaatggacttagaatgagagacttgaatgtcacatactctgcagatgacctcattgccacttatcttttatgccccaagaagagttctaccttctgcggtccattaggttaatggatagagcctgttcctctttgcaccgtggctttttcagcattgatctatttggaatcagtctgtcatgtctccattcatcagtgtccagtggctttctttttttttttaatatgctgtagtcaactggactttgaggacaggttatttcattatgacacacaaaaatccatatggttcaggatctcatttcacagggatttgtgaaacccaaatggccttgtggattgtggtggatggtgtaggtcaccagctggaacaaggagactgcaagtggcatgttatagagctgtgaagtcactttaatgacattgttcttccttgagcaatgtggcgtaacctagaggattctggaaaattactgtagtcagcttggcagcaggcagccacagggggccggctcctgctcaggaagctgcaaagacctgagataaagattctggttttggccagatggagagttagggaaggaggccagaggctgagcagggctgatgaagcagtttggtgtgatgcctgggcaccaaacaggcagtgcacacttcccaccgggatgacatccttgcctgtctcctccccagagtcaggacatctacctgtcactgcctaggtattgttagagggaggcaagacttccaccaaggcttggggtggagtggacactcctgctgtagtgttggtggacatctcaagggaagtgggaacaggtaaacacattccttctcttaagtgggcctttgtctttgcttctggtcataggtggagctcttagaatcatcttggcaatgcacagaagtgaagttttcttttttacctcagttcccttccattctgtgcctgtgttcagctgtattgtggagaagctatggcgtcttgccacctttcatgttgcctgtagtgttgtatatggaaaaagctgttgctttcccactctgggaaaggcttgtatgtttatagaggcccacgggtgagtagttgtaattatattgtccttttaaggcactggccatgccaattctattctttttttattttttcttggaaagtaaacagattaaaaacaggaaacaaaatctattttctgtggagtaagaagccatctgttaccccaaagtataatgtctgagcaaagtggggcaagggaaaggggctgaggagagataaggggagataccgaattaagaagtttaaggtgccatagactgcccaggccacctaactgacacccatgttcaggggttctgggtctgtcctatgctggtttctgggatgtcagtctggcatccatgagcttccccttgttcaggtcagctgtttctgtgggtttcaccagcctggtcttgacccctttgcttaccacactggtagtgaatcagtacttatccctagagtacgactggactttggggcccactccacacagaaggatcgtctctcagcctagacacaagggggagggcctaggtcctgctcctgaatgatgtgacagacattttaagatcccccatggaaggccttaccctccatggggaacagaaaggggatgggataggggtaccatggggtggtaggggaggaggggaaggagagggaactgggattgaaatgcaaaacaagattgtttctaatttaaattaaaaaaagagagggaaaaagttgaaagaaaaaaatgtttaaggtgataatttatagttccccagtccccagaatacagagatcttcaatgtaagtattggagtctaagaggaagaaacagcatggattattgggaaccagagtagtgtgtatggactgctacatgagacgtcggtggtgggtgtggttgaatgacaaatgacagcacagtggtgaggacagttctgcagtaggtgcttcctgaagatgctggagaaatccctcaaccttgagccacgctgagattctcactaccaccttgtaaaaagaactgatgaattgaacggtgagtgcagagagaagaaagtcaaaaacaggttctgtgaaaggactgggaaaagaagaagaaatatcaatgaggtgtgaaaaaaatgcacccacattgtccccctcaaggcagaatgttatctatttttacgatattggcctgccttaatttttgttttggaagaaagcagttaacttccatcacaatttcaagtatgcctacaagaggtcacagaagagggtggtgaaactatggaaagtagaacataagctgccagagcacaggaaattaataatcaaaaaacgaaatatttgaacttaaaggtaattgaaatttgatagaacaacaatgcatgtgcccgtcttgagaaaagcaaagacattggaggccacatcgtctaagaactagaagacatcttaaaaggtaataaatatgggaaagatatcaacaaacagatatctgctatctgctgttcttatccccacctttgtcactcagacagggtcattttcatcccaagatggcctcaaacgtgctatatagctgaggatggtcttgatcttcttgcttctaactcccaagtactgtaattacaggtatgcagccacatgaaaaagggaagccctgtttccctgctgagagcggcagtgaaggcgtgacagagttgatgacagcaggtctcatgtcacagtgagtcaagacagagtacaagcacaaaaatcaagtgtaacttaagaggtctactttagtgaccccacttaccctagccaggccccacctcataccgggccacctgctagggaacatgacatcaaaacccaagcatgtgggggatatttcagatttaaggcataacatgtgaaaaaattctaaagatgaaattcaagaaaaaatttcaataatcctaagatgtcttaacccaagtgccaatagatatcaacctacaatgattaaaacagaactataccttggtaaatttgctagacttagaaatggaaagaaggaatgctctggattgttagatgagcctaaggcatcctcacaggatgatttagataagaaaaatagaagaagttagagcaatcccactaaagtcatgtaatgagcaaatacatagctataaagagaacagaaactttagccgtcatgataaagaataattcttttttagttcctatataataattttttattaatttagtttttacattccaatcccaattccccctctctcctttcctcccaaaccctcctcccatctgctccaaggagagggtagggcctcccataggaagtctactaggtctgtcccatcatctagttgaggcaggaccaaggcacctctccacccccagagccctgtgtctagggataaagaataattctaagatacattgagggagaaccagcaagatggtactctgtgtgcttatctgaggaaatacttgaaaaagaacacataaacaaaaaatgacaatagagagtatacaggggattccttaaccaggctctccctttccatctatttttttattttaatttgggtttgtattgttacatgggctgtgaaagagcctagaagaaatgaaataggcttgctgattcaaaacattcagaacatttgtttattcaaaacactgtctgtatatgagctcgaaacttcacaattgcatttgtgttccagttttattgctttccatttgacgtggaaatggtcacaggccaggtggcagactgcgaatcctctgagagactggcactgtcaatcatattcttctgcttttcttcttcaaaatactctggtttgagacaagatactcagtaaacaacaatcatctggacattttatgaaactaaaggaagcaacaaaagaaggcaggggaatgactcatgctggtgtttaacaagcgaagccagcagccttgctccttcaacccatttagcaaaatgaaacagggaattgagaattagaaataaaattatcatgatccagccatttcgttctgtgcttcaaagattgtgtctttcccctcttttgccagaatgtcatccttgcttgtgagtaattagacatagccacattcaacactcaggctttatcaagaactacgttcatccagggcaagagttgtccccatgttaattctgttgaggtgaaggcattcatagtctgtgttgttcattgctctttattagagcaaagataaacgaggtcccaaaggtcttctgttctctgattcactctgagctgatttccaagtctgactcatacttcaatcattcccaggttcttgaggaccaatctcactgtaaccttcacattccctctatcagctcaagagctaagaacagaatagagttttaaaaggagacaagtgataaatataattggaggtcctctgtgtcagatctgatcacaccctcccagccattagcacagcctcttgcagctgatataacccacacaagccagaatgaaacacctacttagattcattaagagtgccaaatgactaagtcttgtctgaatgacagacagcttttgcctcagcttttatgtcttcgctaaacagaatacatctttttttctactggttggatcttgtttgctgctgtcattctctgaggaatgcacacagaaccaagcgatccattatatctgggatgtgtcacaacgcttgcacgctggctggttgcaagtttgtatgcttgcttgattcccttgcatttgttgtcaaagtagttcccgtgacatcactggcaaaggagttccctggcaagctcatgtgggtaaataccctgtttgctcttaatgtctcatttcccatttgaggatcattactggacacctgccagctgatcctaattgctacagcagagaccaagaggctctcaagggtcaccaatgttttcttccagggagaattttaaaggatccagtcaacatcttgtactcacatacagtgcagacaggaagaccacatattcccaatgcaacttggtaaggatgtgttacaacatgaatgtgcgttgtgataaatgcaaatgtttcattgtaaaactgttcctaccaagtattaactttcttcagattgaaaaaaaagaaaaagctttcttgactcataatctgaactaatgggtgctcgttgggcagtgtttgtccaaggccagattgaagcactatggcacggctgtcaatattaatgtagaattgtggccagatccaaagtaccttcctaatagtccacttggttctctcaactggagctgaatgtaggctagctgtattcacagaggtctggagactgtgttgtctagtcagccctgccttgctaatagtatttgatgctgtcagttcactcacggtacccaggctgttttgaagcttgcttctcctttctctctgtaagaccagacagctatttagatgatataggagtgcgtttacttagccaaagttaaattgaataatcaatccagcctgtataaggaaatgccttctgtgtgccctggctgtgatgtgatctgaaagctctcatccacaaggtgaatgatacagataacttcaccataatgtcccagtttaacacgaatgggggcaggggtggccactgaagcttgtatttttccatagtccattgtgggactggggacaaatgatgggagtaactgaaaggcttttctgggcaggaatgagaccttaatagtagtataattggatgtatttgaaatctgaaaaagtcatatgcagtaaaccagttcaacccctccattaaaagaagtctaatgtaatttccacattttctacataaatatattagaatttactttttctttcttggctaatatcctaattacatatgtatagattacattgatttttctctgtaaagtctatataggtaccaatgccactagataacagaaactagtattaggatgggaatgggtcaaaatgactctggtagttctgtgacttgttttgtcttcaccttttcaaaagcttcagggggaatttttctacagtagcctctgtcctggtcactacttcaaatcccattagtactattattctcaggaacaatttaattgagtgggcaacatttcccagttacttgtccagatgcttaaacagtagaggagaaagattctgttagatcgtccacttcctagagagactatcagctcttcaatcctgacattagatacagaacacttgctacacagcattctgcccttcaaactcagagagcctggatgttaagatacaattaattcaatcccaaaaggtgaaaagccatttctgtcgagtctcaaggtgatatatattcttggtgggccagggaagaaagaggaataatagacaagggggaaggagactctagatacagaaagtcttctacctgctgtagtttttaaagattatcaccaaatatacataggtattatatcaagtgttagaattagaacaaaatctgtctgattcgctaatttctccatgaggatccattttttatctgtaagacaggaggccactcaatgccaggattgagcacaagagataagagaaatccttccttggcactgtggattttattcagtgaccgcccccaccccaaaccctgtgattgtgaggagcttggcaggaaccagagtaattgtacagaagtaataagggcattcatagaagacatagtggagaccccaaaggctagatagacattggttagtagtgttgagagaacattgttgcccaaaccactcagggacagcaatcaggttgtggagaaaaaaaaaaaaaagatacaccagagacctggaagaagctgacaggtgggctgaaaagtacatttcacagatctttctgtctgtctgtccatctgtctttctgtgtgtatgtatgtatatatgtatgtatgtaaataagtatgtatgtatgtttgtatgtatgcatctatctatctatctatctatctatctatctatctatctatctaggtatctatctatataggtacctatctatctaggtatctatctatcgatcatctatcatctggtctaatctttgcagagagatagaaactagataaaaagatcagaggttatgttagaaatgaaacatatagttcaagaaaagggactgtactccgtgtccaatagtatacaatggactgcagaggatagcatcagcagacttgaaggagtgcctagaaattaccacagatttgaaggaagcactcagaggtaagcacctgtttagcttgcataaggctctgggctcacgatccaataatgccataaagaaacaaataaacaagataaaaaaagactaaaaagctaaaaccaggctacttgaaactggaaacaacacaaactgatgaatcacaggtaacatgtatgtctattagttaataaagaggtgtggaaaaatatttgaagtaatgatggtagagaattgaagccccttgacaaaaaggtgaagagagactgggtatggcctcaatgtggtaagtggctcatgcctgtgtttccagtgcttgggagactaaggcaggagtttcaggttccatgagagcttgggcctcacagtgagttacaaattagtctccactacatagtgagatttcatctaaaaaaaaaccacaagcccatccagaagcaaacaaaacagcaacaaaaagactgtctgcttgtggggttagaggcttttcagaatggacttttcaggagcagcctgtgtgggatactctaacttgagtggaaaccataaattacaatggacaatcatgaggatgctcaaggttcacagcacaggaacaaaagagctcaaggggaagccatcatggaatatttgaggagagtaagaagtccaaatggagaaggttgtaggaaataacacagagaggtcaacaggaatgaggccacatgtgactttgagtagatcgccattagaagttgggctcaccagaggaacagaagcaataacacaccatgatatcatataaacatcttatgtatatgtctatatgtatagatacatgcagtacacactcacacatgcagttcctccttatgcacaggaaatacatagaaaacccctagcagctgctagaaagcacatctatgaccagctctctatatattatgtttttttcatatacatattatatatgaggtaaagtttaatttataaattagacatagtaagatattaacagttagtaataggatatttcggtaatatactctaaagttttatgactgttatctttgtctcaaaatatcttattctgtttggactttggcatatttaaattgccagagtttctacttttgtgttttgggccattataaagtaaaataaagaatatttgaatacaagcactttgatattcacatagtcagtttgatatctgcaatggctgtggaatcaataatgggtgggtggtgtatatagcatggatactttggacaaaatgatgagtcacactgccctggggtagaacaagaccttgtgaagcttcatcatgctattgaaagtggaatgaaataaaaaaatgtaaatttgtatttttagagtttttttttttattttccattgaatattttgagtcactggaaactgtttaggatcccaagtgacactgaggatcccaaggaattggatgaggctctcccacactaaggggaagtcatctacctctatcagcctactatttcttatgcggacctcttctaacattgcctactgtcccagaaacaatatttatttctgggcacctttgtgacctggtcaagttgacatatagaattatccatccagaaacattgggcatgtcatgctacaggaagccactgggagtacagggcattctttggtgggaactgtttgggttttgacttgatttccttcttaaggcataaaagcttgaattctgcacacattcctttcattgtttctcatatgacacagtctctcctgttccaatacatcaggaatgtctgagaccaggagaccattcttaggaatgttccttctacttttaaaggttatgaaatttgtttataattttggactttttagttcacatttgaaaggagacatttttagctgtgtaagttcccaccaacagaaaacacacaggtttactttgtatgtaggtcttaactaagatgcatatttcagctgtggcagtgatatttaaaatgggggctgtgcagaagttaaaagagagcttatgtctggtaggaagcaggaagctttatttccatgcattctgcttcaaagtcattccaaatgtcatatcctctgtattgcttgtgacacaagatgatggctatctctgaagagagaaaagcacacttaaccagagctctatctgatgcttgttccctttgaactaaggcacacacttcatcaccaagttgttagtctgttttccaggcctattaggatagaattctttgggtttccatgtaagccatgggagtttggctttaagtttgtctgtttaaaagttgggatagatttaagatgaactgttatccttgattatttgcaattcttaaaccaaaatggcctctagaaagttcaagtttagtgattatctatgtatctctagttaaatggaacaaatgcactagttggatcaagggcatgggattagtttgttgtattagttatttttctcattgctgtgaaaccatacttgaaaaatcctcataaagaagaaagggtctaatttggtccatagtttgaagatgaagtccatcatggtcaggaaaaaagggcagcaggaatgtgaggcagctggtcacattttatttacactttgggagctgagagagataaatgtgattattgtatggatgctgcccacatttagagttggtctttcccttcatttaacttaatctagaaactccctcacagtcattcccagagatttgtctcctaggttattctagagcctgtcaagatgacatccaatatttatcatcacatttttgttatagattgacagttcatgatacctgaccccagttgtattagtcagggttctctagagttacagaagtcataaaatctatctatctatctatctatctatctatctatctatctatctatctatctatctatctatctatctatctatccattatttattggaatgatttacaggcctgcagtccagctaatccatcaatgactgactgtgaatgggatgttcaagtatccagtagttgtttaatccacaaggctagatgtcttagttggtcttcagtagatgccagaatccctcagaagtaggctttaatgcctgtgaaggaatggatatgctagcaaggcaacagcaagcagccaaagagacaaagcttccttcttctatgtccttatgtagtctccaagcagaaggcatggtccagattaaaggtgtttcttcctccctcaagatctggattaaaggtgtgaatcttcctacctcaaagttctgggctagtacattcaccgacttcaaaccaagccaaaaaaaatctctcacaggtgtgccctgcatttttagattgtagttcattctagatttagtcaagttgacaaccaagaagagccattgtatcagtgaatcaaagaattacaattagagtggtgtcataggagaaggaaaggcacagtcaatccaggattagtggaagcaggtagggggaggggcaagtaaaataagtggagtcagtggagaagccacggctgccactcacaccaggccaccaagaggaggtgaggtttaaacatggttctgaaaaaaaaaataaagtggattaaccacttttgaagcattcaatgcctctgagtttattatttttaaagattcattttaatttttaattatgtgcatgcatgtgtatttgatcctggtaggtgcacattagtgaagtagcccgtgaaggccagaagagggcattgaattccttggaactggagtttaagggaaggtgtgagatgatctacacggttgctgagaactttactcagatcctcaagagcagcaatcactgttaacactcaagtcatctctccagcttctgggcttattaaaaagaaaaacaattcttaggctcttgtgtctgttcaactcacttcacttaccaccagttactttgccaaaagcggagaagcccagaaacaatgggctatatttaattcagctgtataatatttcacatttgtgtcagtcaatttttagcccacagccctaattggccatgatgaggtacagtgttgtggaatgcaccattgtattgctcaggcaacagtgcgaaaatcagagcttattttaaaaatgtatatcttttcttaattctttaataattcatacacatatacaatgtattttaagaatatcaaaccctgactcctcccgaaactcctctaaggcgcccccaccacgtctccctcctacctcatgtcctctttcccctcagaatccaatcatttctctccgtgtgtctatgtacatgggttcagaatcatgcactggtgtataggcaacataacacaggccacttccctaccccagcagcctttaactgtcaaaactgctcacctaggggaagagccttgtgagcctggactggtactgtgtagctctcacatccacagccattgtgaattcataagtggaacagccctgccttgtgtagaagacactatttcatagcagtcttccctgacgtctggctcttacagtcttttggctctcttctgcaatgtttcctgagccatgttggaagtggggtgtggtgtggatgtctcatttagtgctacccatgctatagttactcattccttgcatcctggccagttgtgggtctctgtactaatagctgtccgatacaaaagaagcaatgaaccttggaagaaagttttaaaaaatgaaatgaaaatataatttcttttttttaaaagggaaaaacaatgtttatattaacttttgagaatgtattaagaaatccacagagatattttaaaagagacccaaaagtgtgccaactcttccatttttcttacactattaaatctaatttaggagcaagaggtaagcggctgctaaattagggaaaaaatatagcatgggcaggcagtatcactaagaatctgtagggcaatgattgaaagatgtcttcatgtgtttatctcagcaaacaccaaactaaataggcaaacatgcaaaatgacagctcagatttgaaaataataatgcatggtttgtctttgttccttcccaggggtccatgtagatgctagtgtagggcatgaaagctaaggtcagcattgaggaggaatttagagtgggctagagataacacaggtttctatactatagactgaggaatggaaacagttttagcagagtggaggagttgaacctgacctgctgctggctaccactgaccagccctttgtcaaccccattggccttctctgatcaggggcttctggtacttcctacaataggatcatacatgtagccagttgtggggaaacctacacagatcatggttagatcctcatgttctcacctgagtccttgatctccagatgtatacctgctttgcctctagaggagtttaaaactttgtagttggaggtacagaacagtgtcatcttagcctttgcagagcccagaagcccatctcacaggacagctggcgatgtgtgtagatattttgggttgccacactttattgtgctcctggcttctattgggtgaaggccagggctctattagacatcttccagggaacagactggcctcccacagtgaagaattatgttgttcaggatgttagcagaatcaagcctgcagggagcagcttgggggtgaggagtggcacagggctggagatggagcaaaactaatgtctgtctgttgagcagtgaggccacatttgcttccagctaactcccagaatgctatttggcttggtgagtcttctctgtgagaggaaaattgtagacagtgactttgcaggtatcttagtaaagagagtagggatgggggggggcgaggaagaaaaaaaagacagagagggagaacatgagaactcacatttccccatcacccaaaatccaggctcccatctgaaaaggctgtcaacacacacaatggtctcgtcagctttacagcatcttaatttctcatatgagcaacatgaaggaattttagaaatatttaagaattagacattttagaatagcttctacattaaaaggtacatcctcttttcagccccttgcctaagatcaagtatgaaaaggtacacacactcaaataaatctgttatcgtttcaaatgtgtaaacaggacacataacagatatagaaatgagaatgcatccaaaaagcctgtgctgagaagagaaatcagaggactttaaggaatgatctgaattctaaagtgtatgctaaattggaagctgaagaattcaaagataaagttgagcaaatcttctgaggaataataaaaggcaaataaagaagggagaggagataggatgcctggaggtgccaatgcgatcactaaaatttccatagagagagatacagcaataacaagggagagaaatgaatgagagtgaaactgacagtgccttgaaaattccttaaacccagaaatgggtctgcagagggagagtcttcctccttgccagcacttgaaacagaggaaaaagttttcaaattataaaacatatctttaaatatatttgcggcagcaatggcaacagaatgggaacagtggaggaagaggacgacacagggagtaatagaattgattataagcaaagtgcaatggtagacatggatgaaaacgtcaaagcaccgtaacaccattatcttgtatgataatgagatagctgatagatagatagataagatagatagatagagagagggggggtcagatggaggacaggtgcagagggatgctctgggggcttggcaagtccccagtcaaacctggagacaaaagcagaggcttctgggttttcaattcctgaactacagttcctcagtcagatcccggatcctgagcaaggccctctattctaaataccatcctagaacggagatctaaggtgattttaggtaaaggaagagagtgttagtgtttacttctgttaaaatattaagtgtctcctgaatgtccaagtgtccttgtattaaagaattgcttccctgtggtggtcctgttgggaagaggtggacccttcagagctggcacctgctgagtggcctgcaggtcactggctacatgcccttgaggaagattgtaggatccctgccccacctccacttaaggatgagctaagctgtatgctcccccacatccctttcctacacaatcctggcattatgtaccacaggcctaaagcaagaggaccacatactcctgaaggactgaaacttttatctgttactgtggcagaaagctaacacaattttgaggacacatgtaatatccaattggagaattcatagccccaccccaaaactattcttcactacaatcctaaagtgtctaactgatgcttagcaagtattagacatggcgtgaataaatatttgcaaagtgaacgaatgactcagtactccaaatgtggatcctagtcctgagaatcatggaaaaatacagaggaccttacagaagccttaataaatatgttctgatccctgagttcttagggtctgtatctatgggttcaactaactgtgaatggaaaatattcaaaacgagctcaaatttttattaccatgtactgatgattcttgtcattattccctgaacaatataataaccaccatatgcatggcattaacattgtattagttgttctcccctccccccatgctcccaatttgctcaggagatattgtccctttccccttctacaggtatgttaggagaatgagaaggggagaagaagaggggtggggaggacataagggagcaggaagtttgtgtagcaggaagaatagaggagagcaaaataagagataccatcagagagggagccagtataggtttaaagagaaatcaggcactagggaaatgtccagagatctacaaggatgacaccaactaaccatataagtgacagtggataccttaaatgccctcctctgatgatgagattgatgactaacttatatgccattctatagccttcatccagcagctgatggaagtagaaaccgacagccatagcttaacactgagttgaactggaatccagttgcagagaaggaggaatgatgagcaaaggggtcaagaccaggctggtgaaacccacagaaacagctgacctgaacaagggtgagcgcttgggcccagactgatcactgggaaaccagcatggaactgatctagaccccatgaatgtggatgtcagtatgggggccttagaaatctacagggtctcttgtagtagatcagtacttatccctagcataggaatggactttgggagcccatttcacatagagggatactccctcagcctagacactcaggggagggcttaggccctatcccaaaggatatgacagactctgaaaaacccctatggaaggcctcaccctccctgggaagcagaaagggtatgggataggtagggtgttagtggggggcaggggaggaggggaggaagagggaactggtattgacatgtaaaacaatcttttttctaatttaaataaaaatggagaaaaaacaaacaaaaacattgtattagttgttataagtaatctagagctgactaaagtatagagtgtatatacacaagcactgcattagcttgtataatggacttgatcatggatattggtccatggtggcggcaggggtggtggggtcctgaaaccattctcccatgagtactaagaggaagattacattttcagtgaagtagatttggatccaatgaggaagcaagagaaatgaatgaagagtcaattgtactgaggactggatcaagcttttaaattagaggtgggataatggaaaggtttaaccaattatggagccaaaagaatgatgacaaaagccactttcaggaattagagaatgaagtgagtgtatgattttgagaacatcaattgtccagtgctaggggttagcggtttcatctaatgaggaacttccaattactttgaaaaccagggagacctggcataataccagagctgtgcctaggagctgtaaaattgtattaaaaataggagaatcacagccccctgaatgtggtgttaatcctggggaacggccacatgattaaaatgagataagggcagaggaatggcaagtagctccgaggttctctaaccccaagaaggttctgaatttttcatggttcacaattcttcctgactgcccctaaggctccctctatcattcaattcccttccctggaaataagtctgtcgtgtttattgaaagacagggagagaaaggaggtgaatataaatcgctctagtctatgtcccagacaacttgggatcaaggtgacctgcctgctaatatttttacctcatgattcaatccgagcaatcagaattctgttctttatttcccccctgaggctgagcgcccattgactcatttatatctgctgcagtccctgtctccataactggtccaaggccatcttagttatgtttgcctgacctaaccataactcatcactgttcccagcccatccttcatgcctgcattctgcatcttgggcttatctgatctcctcacatgggctttggtctctactgccttcccactcatctggatgacacttaccgcagtgccttctcaaccatcaggatcaacttcatggtttacccttgtccatacatgagtctgtctctcctgccatctcttcatccattggcgagggagtattctatctgaggattacaaggatagtcaagcacccagcacctagcacctagcactgacaaaagacctcagcagcatcatattgtatctttatgatatgaactccatatcagacagatccacatggtgactgcttgtggatgtccagtgagtggaaggaacagagaaaaggcaggtttttggatatgactgagttgtctgaatacatcaacagtgggaagggacaagcaggaattgtgtgtgcccttctttgaaggggacccttggcaaggaagggaccttgaagtcagaccatgtgaggttctgctttttccagatgaccaggcatgtgtgttattgatccttgattttaggttttagagccttcctgtatctcttgatgtatttgtgtggtcactgcctttgactttcatattatggaaaacaatcaatccacacttactgccttgatctacttgctgtttgttatcagatggtgtaacaggagggacatttcaggatagtcctctagggactggggagatggagtactctgagctctgtggcttctgacttgttcctgccctattgtctattgatatggaagcatccaggacagttcacctctttttggccttcagagtctgcaatatcaggatctgcagcagtttgagaaacacaggctccatggggctgctattttgggtttgtttctctctcttgtgtcatttgtaatttgtcacctccagaacacctgtaacatcttctgattaaggaatacattaaacagtggtttccacacaggtctgtctgctgtcaaagtttacctcctaggctagtggtttgcaacctgtgggtcatgaccccttgggttgtgtattaaatactgtgaatgtcagaaatctggatgatgattcatacataacagcagcaaaattacagttatgaagtactagcgaaataattttatgttcgggggtcatcacaatatgaggaattcttttaaggatcaaaacattaggaaggctgagaaccactgtcctaggctaagggttatagagctcaaggggttcagaccagcttggtttcttctgaccttgtgtacttgatagactgatgggtagaaatgctctgggtttgcattcttacaaaggaagacagagaggtgctagggaccagccctgttgtttttacctgccaggctactgttgtgctttctcgaaccatttcagtaaaaattgcagtttcctaattggttacttacttgccaatggaaaagcaggtggagaagttgtaggaatgtgcccatgtgatctattaataccttgatatcttcttccctccttttccccacttcatctttccttcccccctccttccttcttcccttaaaatagtaagtctcattgtatagcctgggctgcttcacagtattccactccagcctcttgagtgttgggaacatactatctctgacttattgatgatattttatttatttttatatttctgggtcgtgaacctatctagttaggccctataataccaaccccaacactcatctccttaaaataaataaaacaaatattgtggtacattggtttttctagtgaagtataaatcgaatgttacacaaaacaaaacaaaacaaaaaaacaaaattactcatagctatgacggtcttgaagaagggcactgtctctctttagaaattagaaaagtcaggatgaagggggctctcctgtggggatatccaacatgcatatttgaactctgtgattttataattatgctccacctaacaatagtaacaatatgaggtggggccatgagtttgagctattgatagagaggttaagcttgtctttcattttcttaaacatctcgcaaatatctgttcctgaagagctgtgcaccagggagaggagaaatacactatctcgggaggtttgttgcttttgagggtgcccatgagctattggcagccctttcttcaaaaggcaatgctgttctagatatgatgctctccagataaagtattactttacttgattgacagtaagatactttatagtttccatccaagagtccttaccagctgaaaagagaccctaagcgttttaggaatgacaacaatgtgatgttagtctgtaggggaacctgtagccacgccttgcttaggggctggctacaggtctgcctgaccacgccctcaggccacgcctacttaggggctggctacaggtacatcagtcacaggcccacatccctcctacagcttctgcagtatttgaaatctctccagagtgaccgccttccatcttccttgccaggcagtgcaaagaagagactagtagtgggttaggttaaggttgtgtttggtagtgtgcaattcagaattacaggatatctaaaaggtggctttgtgtggatagtaatttcattccacttgaaaatctctgccagaccttttagaaacaactatgattttcctagctcatttgcatagcatatgtgcaatatatatttattttaattttaataaagaaatatctttgctttttctacttacaacagaacaaaatatcccataaagcacaagagtaagtaggattaattttcttcttcttttttttatgaccatctctattttctataaataccagatcactgggaaaatgcttttcattaaccaccaagtgggttttcttttggttagcattgtaatggctggcctggatgtcgcctttctcttctggttgtaagaagttagagtagaataatggagtcagaaaggagtttgataatcatggcactcagtggtcccctttgttgagaggagcacccggaagcacaagaaaacttggagtgagaacaaatttccagttgtgcatgttccaagactcgctaaagctgttgagtccctggcttaacctgaggctccaagggagcttttcagatacctactccacgacctgtcctaattcttgaaggcatcgatcctttgaagtttgaacaaaattctgtgtctgttgagatactcatttagggagatttccactgtagtaagtctgtgccagttgactcctaagcagtctgctactacctgcccagcaagtgaatgatagaaggtcttcaacaaagggtgaccccatagagacttagtgtggtttctactttacagtcatggccatttttaatctttacaaatagagagacaaggagggcagaattcaattcagagaattaagtgtttgcagaaggtctacacacaattacccaaactcaagacaagggtattcaaaagcctaatgttctcacacttcccttctttcctttacgtctgatgtgagtttcttggagtttttaaagcatgaatgtgctttgtaaaagctgggctgtgtaaagcaggatgtaactctgaagacaggcatggctttcaaaagtagcaggtattcgattcactccaccaaaatggacagaagtggtattgcctagttgatactgtgccaaggagagtgttagccatatgtatcctgttccacaaatacagaattcaaggggaaatgtgaaatactttttcagttacttgaagtgttccttagaaaggaatgttactaatttggagagagggtttgaacacaaattgtttaggggccccagtaatgtaggagaaaagaaactggggactctcacgctccataatttccctgttgtgtgatatgatctcccaccccccacctgatagtgacattgtctatcatctggtataacactactatttaaacacagaaattaagaaatgaaggtatagagcttagatgaattgtctgtttgacactctggaaagataggctaccatgttgctagtcaagttctttgatgtagggaattttctttgtatcttgctttccctaaaatatcatttgagtagggtccccccacctcttgcatcttgttttgtggtgttcatcgacttgctagtcccaatcagctcaattaaagcctcccatctccttttcaaggctgcaagtggtctggcctagtgaccttgggctttgctaatggaaatatggattaagaacaagctgtggctggctgggaaacggaggtgcctcttgttacttcttatccacttggctctatcctttaaaagaggtagcatgcacacacaatgaaacttcattagctctcactaacaatgtaagcaaattaattgctttggaaaggtcatccatagtttaacatcataaattatgagattcagacaaatgaaattctgccttaaaatatcttgatggcttcatgtgtctgaaccattagacctttaatgtagaattcttttttcattttttctcccacccacgttgcctgtcgatatattttatctacattatgtctaggaattttttctttgctttcccagaggaaatgggattcactgtaattatccaagtacactattaatgccattcatgtcaggaaagggaagttccataaatctaaatgaatgagagatgaatgaaagaatgcaagagaatctataccaacacagtgtgggaaatatcagagtgggcagaaccatcacaactggaattagtgtccttatgagaaaacccacaagttcttattctatactctccaccatggggcatggaggaagggagctgccagaaagctaggtgggggtggggtggggcttgccagatctggcagtaatttgatgctgggtttcttagccttaaagactgaataaattgatgtctattgtatgagtcggcgtctctactctctttttgttaaagaaaccttaactatctaagacggctctttggaagaatagtgaaaattagacgaatgtcatcctaggaaattccacacagttacaatgggtccttgtcaaggattgactgttcaatgataacaattgcctgatatttctgtatgcaggatggttctttgaaataatgccagatattggacaaatatggcattcataacacaagggtattcagggtaattaagagttactcctatctcattggaagaacataatgtttacagataactagagcccctttaaagatgcataactttagattacatataaaattcagaatattgaaggccagattcttaaccatcacacattaatgggtaactagtagattcagattgctgtggtgcacttttgtgtctggaggctgatagaagttcaaagtggggtctcccaactggtcaactgggatcttcaatggtcttagaattgtacctggcttgtgttagtcatgttactgtttcaacttcttcttggtttagtttatgtcattttatgggatttcttggagccattctctctctacatctaatgtctcaaatttttgagatgtagagattatttcgtttccttttaaagttttatttattttgttttatgtatgttagcttgttacacacacacacacacacatatatatgtgtgtgtgtgtgtgtgtgtgtgtgtgtgtgtgcacgtgtgcgcgcgcgcgtgcaccatatatgtacctggttgtagttgtcctgacctgaaggacagcaacatagagcaagaagtccagggaggggaatggggacaagagacatgagagaatgaccacaagacaggattctgatcaagtggtaaattttatttttttttccaggctagtttatagagtcagtagtatggggtaaagggaagggggaaaagaggccaagagcaggatgttagaaaactatagaaagaggatgttgacagggtaaaaagttcatgggtggtggggtgaggaagggttacctaggtaagtggtcctgtggttggaacaaaggattgacgtctgggtcatgttgttccttctgggtgctcatgcttcttgaagccatttataatcgaaagacagttctataaccgtgtggcttgccaagtttggcctaaaggttcatgccaagctgtgtggctcccaacacctggtgcctgcagaggtcataaaaggtcatcagatcccctagaactggagatactggatggttgtgaggcaaaatatggattctgagacaggaaggatgacaaatgttcttaacccgtgagccatctctccagccacctagagatggttttcataaagatgcttttgggagtcccaatttgaatttctgtgtctttgctgatggaattactcgtgttctcttggtgcctagttcagcagtgagcccatttgggagtcttagtctagtgcatcaagttagccaccagtgttattctgataaatttgcagccagagttctttcctttcagtatctatctcacgaggaagcactgggaaaatctatgaggtactaagacctccatgcttaaatttggactagggactccctaaacactgatgataattccttttcatctccctcagccagcttcaatgactgttgttggtgtcccctctgagttaggcccactcactttcctgcctgtcctgagaaggccttttgttggcttatgctttgcctcacagtctgcttgtttctagatgaacaccattgaatctactaactacagctggcagtgatgtgggagagcataattaatggcaatctctcttctatagaagtcagtttctagagtgaaatattatacataggttttcaatcccttcaaaagttcaaaacacatttatttatagctcataaaattggacctgctaatttaaaattggcatggctacgcttgtactcattcacatttatcacccatacaaatcagaaaacagtagctggtgagtaataattatataacactcgtaagagaaggtgttgttcacatatttacaagagtagtgagaagatagtgaagggtctctaagatgacatgtcttcctttgatggacatataatcaggagatgattccacagtccctgcctgttccccacagccttcttcatctgtccatgcagcgtggtctcctgtgtctgagattccatgatcctgtgctgtaggcatttctattcccagaagaggcttgaaatacacatatctcagagaattagacacagctgattacaactgtcaacactctattagttgcccatcttagaaggtgggctttaacatcagcaccatgaactgaacattcttgggaaatagcagaaacattttctacaagtttctagattgtcaagtgccaggcagtagagtttcactctatcatttgtggatgtgcaaatatcatattaccctgcaaatcagagccatcttggaattaattaaaagacttaaataactcaacttgtttatattcataaatcttagaatgaaactgcgtgagcacagaggtgagaatatgcctacccgccaggtatatatggcatttggctacccagactaggaggaaaattaatcaccattgttgaatttttctcttgaggtttatttctgatttgtgatagcatatattagcaatattttcccaagcatttggagattttagaatcctcagagagtattgctggtctcatagaaggacaacaaaccatacaagccgagtcaaggtctttagaatatctccataaggtttagagtaagtttcttggtttctacccccaaagcctgctgagatttcaaatgatattgtcaagaattttcatatctttcaggggatagaatgatgcattaatacaatggcattttatatattctaatatatgcatgtgttatggctcaacaacctcttcctagttaaatgtatacatatcattaaagacttttggacaactctaccaagagttatagacaaatatgcctctagattactgactttaatggaaaattgccaaacgtttttgcttatctcctgataaaaatggataaatcatggcatgttagactaaataatcatgggttatatgaatgtaaacaatgaagttactgttaaatatggtggttattttaaagagtataaacagtctcattacatcaattacattaaggaatatgcaaaacagtggcatgttgtttcagaatgcaaacatatgtgaaaagcttataaaaggagctcactgtgaaccacagaaaaacactaattcaagactaatcaaataatgaaaatcaaataaaaagctctcacccctctagaagaatcttagtgtccttaggtttgacaatgttgtcttgcatagaacagaaaaagcacaaactataagtggtaaagaaatccaatagttttacttaataaaagttaaaaacgtttgttaataaaaggtatcttttctgtacccttgaaaaaaagaagttcaccccatgaaacaccctgtaagagggtcaacagtgagaacatccctggcccacacatgtctagagtacttgtgcctagattatatagagaaccatcagaactctgtgcatggcaagtaaacagagcatcgtgtgtttccctcagactttagaaggtatcttggttaagagaaacctggcactatggaaattcataggaatctacaaggatgacccccaactaagaatctaagcactagaggagagggtatcttgtctgccctttccttataatgagatggatgactaccttaattgccatcatagagccttcatccagtaactgatggaagcagaagcagagatccacagctaagcactgggcaaaactcctggaatacagttgtagagagggaggattgatgagcaaaggggtcaagaccaggctggaaaaacccacagaaacagctgacctgggcaagtgggagctcactgacttaagaccgacagctgggaaatctgtataggactgaacatggatgtcagttgggggggcttgggcagtctatggggccactggcagtgcaacctgtatttatacctagtgcatgaactgggtttttggagtccattccctttggagggataccttgctaagcctagatacaggagggagggcctctgtcctaggccaaatgatgtgacagactttgatgatccctgataggaagcctcaccctctctgaggactggatagggggctgggatggggagatggtggcaggggagtggaagggcaggggagagagggaacgggtttggtatgtataataagattgttttaaaaataaaaagggaaaaaatcctctctctataaaaaattcacatactctcactgcaattctatcaacttgtccagcttggagaactggtgaatttattggacttgcatacagaacatggcacggaaattgggcttgcttacagcacatgggtgaggggttatgtactggagcatgggtgattccaaaggggccccaccacccaaaagtctcactctagcttggatgatgacttccctgtagcttcatagaggcagattcccccttcagttagccttccacactctactactctagcacttcccaagaccatggaccacatggaattaggtcagaattacctataaatggccaggcgattcagggaaaagctgccagaatcccagtgggggctccatgactctcccaccacctctttctatgaaagaaagttaactgtcattaaggctcatcttatgggtctcttgaaagtagttgtagggatgatgatgatgatgatgatgatgatgatgatgatgatgataatgatgataactgttaggctcagagaatagtcctgttgggagttggtgccttgaacagacattggggctttaaatgaattgaatgcttttatggtgaaagtatcttctcactcatggaactggctttttatttttttatttttaacacatgagagtgtgttcctataaagtgagcctgacacttttccttaaattctcacatgttcttctgcattgagatttttcccctatttgcttatgctgaaccacaataaggcaattagtagaagtcaagtagagctgctggtaccatgctcttggatcttctggccaatgagttaaatactcctcttttgtgtatcaaatacccagtctcagttatttggttgtggaaacagaaaatgagctaaaatgcagttttcagaagtcaaattttattatggctaaaagaaagagtacctgtaaatcaaccaggacaaagaataaaaatatggaaagatatagatagtgcatagttaacatcaatgacacaaatacaagtgagcaatccgtgaacatatttaactctgtgaaaaaaataaagataggctgggaaaattttcctggacaagggacaatgatgaaattatgactctatgaagtggtagaatgtttggcagggcccacggatgactacaccattttgctaatgttgacagctggctcaggaactaagtgagcttccttttgctgataacgtgtcccaggaagacagatatgtggaggagaggccctgtaaagggcagattcagatccaaagttaatatgtaacttgcatatcaaaatagtgttgatctcacttttacctcctgattgggcattttatatcacatgggtttacaccactgtgtgtccagatgaagagatgtttttaacaaatttactaacatctctttaaaaatggggtttctggtgaatgcattttgctctccctttttttctttttcttttccaaggatgtgacttgaattcaaagccacatgtatgaaaatcaaactttctttcattgagctatgtccctaggccttcattttttttatcttgttgattttccccaatagtcaatcacttttcaaaatttaaagatgatttaatcatgggctattaaattaatgattagggtattatttataaaacccaaagcttattctaatgaaacacctttaatgattagccttgctcatttgtgatcattgaaaatggttcaattatcaagaggctctctgttctgagttcttgtataattgaaatattgaactctgtaaagaaagctcctgcttctttggcctggaaatgtcatgtttcttaagaaaatctgggggttttcaactgtctcttctgtcctggtgcctctttcattttcacctccctaagaattgccataaataacaacaaagttatcaggatttctaaaaatgtatgttttgtcaagaccctcccatgagctcagagattagaacagagatgactaaccctttctaatgtgcttagaaatagtcttgaagtaactttcattacagaatggatttagtaatgctgactccttaagtggcctcgagagtttctcaggtgacataaactgggcagcacgttctgttgataaatatgatcttggactactgtttgttatgataaatctttccaccaaaagccgcctgagtcccaccgccatgggtgagctttacgccagccgcccgcccgagttagacccaaatgaatacacagaaacttgtattaggttcaaagctgcttggccaatgactaggattctcatctgttagctcagtctcaattatcataaatctatatattttataagacttatcttatcagatgccttattggctccctccttgccggtgctcacatcctgccattggaggaggccaaggggaaaaagggacccttcctgtttctcctttgcttaaatatgagtctctttgctatgtcacttcctgcctggatcaccacttctctactacatttcccagaatcctagtcctgtctaacttgctgtctcattggccaaacagtattttatttaacaatcaataagataaacatacacagtacattacctatcaaatgttcagtaagaaaaccatatctaatcactgtagggaaatcataaatgagcttagactcaatgaagttaggctgtgactgtatgagaccctccctgggggaatgtgatctttggaagaacttttagtttttcaaatactgtcacaactgagaatgagatgtccttccaaacatttgccaatgaaaagagaggcaattgagtgatttttttcagaaattattataatcttaaacaattcctagtatgacaatccctagggtgcagttgtctagactcaatttcttatttcctaacagtggccatatgatcttaagccaaacatgcaaatttcatgacttccatattcttcccctctgagctgtaaatattcatatttttctcattgatttcatgacatagtagaatgaataataggcatgaagtttctctgaaagttaaagattagcaatatgagatttaaaaataaacaaatgcgtccagcccttcaacgaactagaaattttgagttgttagggatatggaattgttacagacttaaggctagagttgtttgattatttcatgtttaaaattaaatgaagtgtgatgcatgaggcctagtgtgattcattctctggtatcatctttaacatcagagcaagtgtaggtatgccacatcctctctgtgccctgaggttttcattcattaagtggagatgagaccaggactttctcttacaggattgttgtgtcatgtgaagtaatagatcagaaggtaatggtctgtgtgtacagatgtctaatatattagatgtttccctaacttaaatagaacacactagattataacctcaatttaaaaatacatgtgtagaattccaggaaggtgttatcaaagtgcttccatgtcctgtgctgaaacacagcagtaaacatctttgcagttgtggttaatgaagtgatgaatgctagcctaccatccatactgcagaagcatgcatcctgcccagtgcccattctgagacaaactttagaggctggagctcatacagcatgaaacaatgcactggggaacttcaggattgctggtagatatgggctaccattttctgcagaaattgcaagcacacccatttgtacaaggacacatatagtaatggtttgagtttaccattttcacatgccacaacactgacatgagagttgattgtaacctcctcatatctcttcttagagtttcatggatattctgaattcttctatgttcctttcatattttctagaatgctattataacagctatgaaggcctccctgctctgaatgcagctgatatccttattaaatattaatgctctattttaaataattcttctaccactttcttctgctctgtttgtatgttcatttaagctcagatgtgtggatatgagtgcgtatgacaatcttttgtctaacataggtcctgttagcctatcagaaactttgttttttctttcttttttctccattttttatttatattagaaacaagattttttacatgtcaatcccaattccctctctctcccctcctcccctcctccccactaacaccctacctatcccataccaattctgctcctcagggagagtgaggtcttacatgaggggggggtcttcagagtctgtcatatcctttgggatagcgcctagtccctcccccatgtgtctaggctgaaggagtgagttcgagaccagcctggtctacaataaattttgtgtttttaaaatgctaacaaaggtatttaacatgatctgggtcagctggagtgcctttcctgtatttccttaacaaaaacagtggtgtgaccaaatgtcacaacaagctacagtttcaagagcctgagcaaagctcaagccaaattaataaccatatatctgaacatcactataaaaatctcacaatcaataacaaataaaaacagaagtcttcaaagctgtcacacaaaccattatttacacacgtaggatattgatgaaatcactgctgacttctcccctagcgacagaaagccaaatggcaacaaaacagcttctagaacaatgacaatttccccagacaatgctgaaaggcttgtctttggggcaaaggaaaacactgctaggaaaaaaatgcacatctgtgagaagacatgaagacatttagtatgtcaacatgtagaaaagattactttacattctttatgaaattctttaatacttgagtgcttgtttattctcgagatgagtttcactctataacccaggctggcagggaatccaatgtgtagaccaggctatttcaaacttgatacagtcttttgccttagcttcctaagcacacgaactacagatgtgttgctgtacctggctccctactaaggtaaaactagtaacaatgtattaggaaatttctatcatgtactgaattaaagaatctcaggataagagtgtaggattcttacctcattgatgaaaggattgaaaagacaggtagagtgtgacacacacatacatacacactacatgtacacacacacacacacacacacacacacacacacacacacacacacagttttgtaagcaaacagaagacagaagtatactattaagaagttaagtgctgggatgaagcaatggctcagtggccattgttgctcttgcaaaggacccgggtttggtttctagcacccatgtggtagctcacaaatgtttgtaacttcagttcccggggatctgataccctgttctggcctccatgggacacacacacacacacacacacacacacacacacacacacacacacacacacacacacggtacacattcatacttataggcaaaacactcacaaaaaagaacttagccacttttttcttgtgtttgtttttgttgttattttataaaggaatgaaagacaaggtgtcaggcacaaattacacccttttcaagtatgctcccatagacctacttcttccaactagaagtttctaggagaaacttcttcctctagaagtttccataaccttacaatagctcataaagttatgagcccaccagtggattattatgtcactggaaggtcaaagccctcattatccaatgacttgtgagcactgtataatggagaccaagacttcaacaagtgagatttgaaaagcagtttagatccaagccctaatattgttccaaggatgaattctttaaagtcactttcctttgaattgtctgctggtgattagagatttagaattctggtcctttttcttttgttgggacaaagagtcttagctctagacttctcaagttcaatttatgttggttttctttcttcatggtcacacataccacatacagagttgtattatatatttttttgaaatgtcacgaatttgtgcaaggtgctgcacatctgtaataacaacactcgggagtttgaggcaggaggataaagagttccaaagcctgctgttgggctccctttagctggaggtccctgacatcatcactaaagaactaactacatcgtatagcctatctttttttgagggggggtattgtttctttgagttagaatttttctattatccacagctgattttgttcccactatgtagcccagactgaccttggactcagagaaagccttctgccttggcctcctaagtgttgggatgagaggcaacttcactttaataggcctaggctacttcactttaataaataacaattctatgaattttcttgcaaatgtctttatttcagggttatttatgattaaataaaattccattgtgtcgatgcacattttccatatccatttatctggtgagggacatccaggatgattccacttcctagagagtatgagcagagcaaaaatgagcaagtatgaacatctttgtagtagggtataaagtcttttgggtatatgcctagcagtagggtagctagactgtatggcagtttttattttttaggtttttttgctgagcctccatgctgattgccacagtggatgcagcagttcacactcctgtcagcagtcaacaagtgttccacagccctctggcatttgttaccctttgttttactgatgttagaccttctgaatgaggtgtgatagaatgtcaaagtagtttttactcatatttccctaatggctaagggtgttccacactttaaaaatatttattggttgctcatgctaaacttaatacttaaaatgaagaaatcaatcaaaaaagctttgaattttacttgcaacttacttagccacagagttccgatacatgatgggatctgaaagtattggcatgtggcagaaattgctgctgtgtagtataaaattagataaatagaagatagaggataatcaattcttgaaatatctgtgcattaaaaataaatttactaaaaactcaacttacactccaccttttagagccccgtcaactccaagaagttgagaggtgagaacttcattcaccaaagatatcataatgttttaaccgttcagaaatagataggctcctaaactattgagaaaacaatttaaaacggcccatagctatggcttcacttttcaaacagacactctactcccatagctagtaaccttattttcctattgcagacactagtttgtgtccttctaaaggattgtccgcgtgcggtttaacccactcaaatgcagagccatgcctccatccttttctccaaaatagatcatgaattttcccttgtaaccagaatgtctctgtgcttgaaattcagacactgaaaatatatccaccttaaggaactcccattccattcctgtgggcacagaatcttgcctcaggattttaaccacactaacatgccataataataatgaagcacttctctctctctctctctctctctctctctctctctctctctctgttttttccttttgaagcaatgggcgtcttgctgtatttcctaggctgatctcaagctcgtgagctgacatggtcctcctgtctcagcctgtcaagtaggtgggactgtaggcttgtgacactgggaccagctcttacctttttgtgaactatcaattcctgatctctgtggtagtctatccaattctcacccatacctgatcatcacagacaatgcattttctaagaaaataagataatgcacttgtataggacagcttacatccctgctcagaaatggagtcttactcagagatgcacagtctgcaggcatttcactttgccaccacaaaggaactctttacatcatcacgttcatatttatagcttccaacacctctgcatccagaaaaaaaagcatctttgcagtacattacatatctcatggcccttctgaaataaaaacccctgaataagacatggtctgcctctgtgacagaaccaaatattctgttggtgaaccccatcacagagcctttggatcagaaaagagaactctagatttcttcctcttgtctgaattttctggcctctgtgcacccacagcattcaagggcacccccccccccgttgttcaagctgaaacctaggtggcgtcttctttgattccgattcttttccttccatacaaattgctagctattgtcttattttcttcactcataatgtgtctcaaatccacctattttcttccatctactcatgtgacacagtacttactgcaaagtacttacaaaaatgtaaataactggtctctttgcctctattctctagaagtccaagggatatctatctatctgtctgtctgtctgtctgtctgtctgtctgtctgtctatctatctatctatctatctatctatctatctatctatctattctatgtatgcatgtatgtatcaatcatctatctatattcatgtatctatccatccaccccccacccacacacctatttgctccttatccattcatccactcactatctatacattggagacaagacaacacactatttagctctgggtgcctgcaattcgctatatagactagactgacctcaaactcacagagatctgtctctcctttgcttctcaagtactgtgattaatgatataaaccaaacagtagtttcctgcttaggtaggaaacccgagcaccagcttttctgtagcttggaaaatcctacatcatcttcagttcttggtgacctacaggccacgggggataggaagtctcaggatggaatgatgctttagagcagggcttctaaaccttcccaatgctgtgactctttaatatagttccatatgttgtggtgaccccaaccataaaattaatttaattgctacttcataactataattttgctactgttatgaattgtaatgtaaaaatgtaaatatctgtggttttcaatggacttaagttacccctgtgaaagagtcatttgatggcccaaaggggctgtgacccataggttgagaaccactgctttagaaaatgttcatggctccaagggcactccaatcaactgcttcggtttaaacattggtctttgattaagaataaaagttattatcaagatcatggttagattagggaatacgagtggaagatatgagcaaatacaaaaaaagcctgaaatagaacatgagaataaagggctccatgggacatagtatctcaactcccaaatgtaatctcaacagaggtgggtatctctatctgctggcagttcccactacactgtggaagggagcggggaggctgaagaagcagctgaagagtaaccatggcagggagctggaaagtggaagcagagcaaggctaagagccaatgagcagaaggggtcctgcagcacctcactgatctttggtgtcactccctgggtgcactgcacagctgcttgctgcgtgcatttctgcctcctggctaccatgcaggatccttgggggaaggaaggcactctcgtgagaaaggaatagaagaagggaattatcctccagcttctggctttagttccagaatctgccttggcagatggggatttaaattcacacagagaaaactatttgtttcgggttatccacaaggcacttggatctggctatatccaagctagtaagaaagctaaaagggagtacccccccccacgccacaccaagttctttaccagaagatgctatgatacagtataaagcagctttgatatctttcctgcctcaaattacagttgtatggtatatatggagtctttaactttttttgttttgtttttcgagacagggtttctctgtattgttttggaggttgtcctgggactcgatctgtcaaccaggctggccttgagctcacaggcatccacctgtctctgcctcctgagtactgggattaaaggcatgaaccaccaatgcctgtctgagtccataacttttgaggtgattttttacatttatttttgtagagcaggcagtgtgtatatcagatgataatgtgtgggagttattcttccttccttcctccctccctccctccctccctccctccctccctccctccctccctccctcctccctcctcctccctcccctctccctcccctccctccctccctcctccctccctccctccctccatccctttctctctctttgtttctttctttcctatgtatcctccaggctctccagggttagtggcaagcacttttattcatggagccaccttcctggtccttggatctttatttttttattaacctcttcatagataaatattcatcaacatgctatataaaccaggtctgtctgctacgatagactgtctacaggttccctgccttttcttcttgatagagcctccatccaataacaaatgtcatttcttagcatcatttttaaagacctacttaaggaaataaaatatttcaatggaaaaatcaaattgcacagtgagattttaaaatttatcttctgtgcatttcctcctgccaagaaaaattggtagaatctgtttctgtggctcatattggagcaaataaatagcatgcacagattaaatatactttctcttggagaggctctcatgggaatgcccatgggattgccaactctgtgggtggggcttgaagctattgattcaaagtcatgtgcacaacatactttgctgggcaggatctgtgagagcctgtctcaagcctcatcatattaatccaagcaaggataaatgtgagctaagattgtaaatgctattctttccctaacttatgccctatgactataagctagttttaaattaaatgggagtatgttccacagtccatattgtcttgaatattttaggagtatgccagaatacacaagtttcgcagtatgggataagagatgcagctgggtttttaactcatattccatattttctctttctttgttttgtattttcacaatcacctttgccctagaatttatctgtgcccttttatcctttcctccactggccactagcaaggtggctctatgcttttgttttctttccttttccctttttgttttctttctttcccttgctctgtccctctgtccgttcctctctccctcttattccttccttcctaccttttatctctttctaatattaactggacatagattttgccccaagattttaaatacatgtatttttatgtatttatgtattacatgtatttaaaatacatgtattgtattttacaatgtacaatgtattttaaatacattgaaggtcagacatttttagttcctagaattctatagatcttgaattgtggcatgcctttaccactcaatcttatattcagatattaatctgtatcaactgcaaactcaaatcatacacacattacttctttagtgatacaacttggctgtgatggaaatgcaggaactttcagccagagtttgctcactcccacagtcctcatatacttgcaagtcaaacagcatttggtacaaatttaacttgccttgtgggttggaaatagatgatgtgcactgtttaataagttaggagttccttcttatacataaccaatgattgtagagattagaaatacaaaatcaaagattgtataaaataaacaggaaataaatgccacagtatgcaagtgataaaagtatagagacatctttagggccaaactaacaaagagatagtagcatctatctgtaacttctaactggttaaattggcttggctaaatctgtagactttgaacaataaaataattgaattgtgaaattgcatattatattatagaatcttcttgtgtgaattttacattttacaagttttcccatgagaacacaaaataactggttgttatgttttggaagtggtttgtcccaagtggttgcttgttggaagcttcatccccagtatggtggtacaggggggaagtagaatggagatggggcttgagtgatatcctaaggtcaatgtggcagtccctcaaaggatgatatggttttcatgagagttgtcctgagagtgaacttttatgcaaagaaacccaaccctgaaatcactctgtagctgtttgtctggtgactgggtctccctcttgtacatatggtctctgtgaagttctccctaaagaaatatgttccaagtaaacatctcatctttgttaagctagctgttagcatcaccatttaccataacgaagggggaactgtatgccaattccattctaagggccccctcacacactgaaaattgctttgcaatcctcatgcactctgttacttattgataattattatcatgtatcagaatactgctacatgggtgaattaggggcattggttatatgggggcatcctgtttcctctttgtttccagaaatatttcaatgggagaggcaaatcaacagtcttgacttcatacaaaacgaagcttgaagacgtctactccttctgttggtctggtctctgcacttccatattttgagaagcaagcacaaaatccagaattggtaaattagaccctttgccaatgatcttagaatcctccatagatggaaacagtatgcatccaactttttaagcacaagaaaatggatgatgccacataatgagatccacagggagagctgagaggtagggatgggggcacagcagtggtagggctcagtcatcatagaggactcagctggcctataacactctttcagctgtccttaaagaactggctgttgcttttctagcttgtcatctcatggtctgtagctgcagaatcttaaaatgcataaacaaaaattgaagagtataaaaacaggaagtgaagggcagcctgatgaaacagagagaattccttctccgtgctcctcctcttgctcatttactcccctcatttcttcttcctgtcctcctcctcttctctccttcatcccctccccccctcgtctccttttctcccccctttctccttccccttagcccctttcccctaagcacctcaggatctttttttctggtgtctcattccctacactgagttaagggggacatgaactagggaattctcagccacaatctcaaggcacgtgttctgccagccaggcagaatgagggaagggattggcttatgagtggggaaaaacatcacaatcagaatgaaaaaaaaacagtaaaaattgctgcagttcattcattcattccattggtcacagcagcatgaggcctgtgaaagatattgccatggaaaccaggccggggcagagacactggagcaggtgcattctaggctttagatcctgtgaatcctcacattttcaaaggtcatttgcttactgcttacgttagtagtttgttctttgcaatcaatgatgccctaagcgactccaaaagtacgcagtgggagcctgattaaatgggttctgacatcagctctgccattcaacatcatgtgactgggaattaaccatgccgtgtctctgaaccccattgttaaccatccatggaaccaaactttctagctgcttgaatcctattgtcactatcagttctatgatttttttcagatatgttattacagtcaatttcaggcttctggttctagaatagccatgaaattatttttaaaaaattgctttcttcagctaccttaaaaatcacaagagcttattaatgttaggataaatagaggagaaattgtgttcaagaactggagagacttctgaaggtaaaattttacaccaaaaatggcccagctttagtgtcttggacattgatttgttgagcctataaagcagtgtggcatgagaaggtggggactcatgaagactttccaaccttttgctaccttctcacactaaatcaggaagtatcacttaaagattcactctgtagtaggcacagaacaagggactgaagtggaatcatgttctatgtatgtatctctttcaattaagtttggtaacaggtaacagagacccaaagaaataccagcttaaggtaagaactgtgtgctttttaaaaatgggaattccagaagtatgatcatatatggagctatcacattgctacatgaagttgtgagggtgatatgtgttacagaaaggagttagagtagctcctgacacagcaccttataccaacatttgtggttattattactatcttcattatgtttaacagcaattgctttgtgactgggatcctcaatgtcgagttggataacctcacaaatgtggtcacactggctctgtaagggagaaggaatagaacaaaaatcaatgcctttccccaaccagacttctgtaatgtgaagccacgacaggtgcagagaggaggcctagcttgcctttggtctcattccttccttgtatttagggagaaaaaacaggtatgtcaagaaggccataaatatagtagacacagaaaagtaacttgttattaatattcttattttgtacatttcaaactttgcctcagtgaatatgtctgtttgatcttgactggccccccctcctgtcttcctcactgacatcatctagaagtcattccttttgaagttctctagattcttgtctgtttttcttttgttttgttttggtttttggttttttttttgatttttttttaggtcagaaatttctcaagttgcttttggtaaagctagattgggaatgacttcaagtttattaatttatctctaaaatatccagtatgacttgttaagaggatgatataaatgatcttgaggccagccagaggaaactctgccagtattttttctttttataaaatgaaagagcatctattcattaacccatttctagaacatacaatggaaccatcaacctaataagaattaattgtgcccactttagttctaatgaaaaattcatctatcatgataacatctcagtaaatatgaagtgtctccttcataatgattttctagaactccaataggagaatcacaaaaccccttgggaaatcatcgacaaaaaagtcctgattgagtggctgtttataggtatagattccttgttgatgtgacattttaaggggacagtaacaagtgaattgctttcatacaatgattaaggaaaggtaagagagaagaatacaactgggtcaatatcaaagatggaaaatgacacatagatacacataggagactgctggaatttccaggaaatttccagactgggaaaagttgaaaaacaactgtcaaaagggttgtgatagctacaatccctagctcaatggcaatacaaagtagggagcttagaaaccttcagattctatcccagagggactggcaggtgagaagctgccccctctcagaggaagaatgaccagagaaatgctgaacacagtcagcctcagaacattgccactgttctattcccttggtaacagacatttagtagagagaaagagagaggcaggaagaagggagaagtatgggggatgagagagagagagagagagagagagagagagagagagagagagagagagagagaatatgagtgagtgagtaagtgacttgtaaactcaatctgaccggggtggggactacttttgcaacctgaactttgaagatagtctgtcataaaggttggagctaacatttacaactgtactcccaaaagtccaccctgtagtgttacctgtgatccagtttgtaaaaagaccacccactgatggaccagcatcagtgacccagtcatgcaaagaactttcatcaagagtgttgatatagaactaacaagctagaatgcattcattctctaaaaacttgttcagcatccaactctcatttcctcatgcttactgcttctttcactaatacctaatgttaattgagcaggccattttcccatcctgtgatctcctccctccttttcagcatgagtaatgaaaaaaaaccagagacagatattggcattcaagttgaagattagagaagcaaaacagccaaacaaccagagagctcttacctctgccaaggatggagaaatcctgttctcactgtggctggagacttattgcccaagactgaatgtttggtctgggactctgctcctatcttatatacatctctagtgctgggattaaaggtgtgtaccaccactgcctggatgctatggctatggctaactttgctttctgatctccaggcaaactttattagatcaatatatctcccgactccctccctccttctcttcatctcttcattttttctttatattttcaattctttcattttttatttttcttttaataggctcttccaaagaacataggctagactgccttagaggtctttgtatatcagcatttgggtgagcaggattagctttagattgtctggttgaatttatttaataatggttgtttggggggatatattctattctctgaggagtactggggaatgaggcaggtcccaggaattccaggcagcagaagaaatattacatctcaactctattacaattcagtctttcttgaatgctgcaaatatttctactaaaagagtaactatgattaaaacaaatgaactagtgacctaatcccagtatacaagacccaatataaaaccacaagaaatatgaaaaaaagaaaatcaaggcagcatgactcctccaaaccatgctaagtccattataatggtctgtagggagaatgaatgggatgaaatcacagacaaagaagtcaaaagaatgattttgagtatgctcaaagagatcaaagaggacacaaactcctgaatgcattctaagacacaacaaatagctgaatgaaataaggcagttgatacaggatatgaaagtagaattcaataaagagatatagctactgaaaaaaaaaacctgaaatactggaaatgagaagttcaataagcaaataagccctatgcaaagcctcatcaatagaatggatcaaggggaggacagattatcagggtttgaagataggtcagaggatctgaatattcagctggctacaaaggtaaactaataagaaagcatggacagaacattattaatgtgaactaataagaaagcatggacagaacattacagatctgctcaatacaccaatttatgatgcattaacatagacaaagagggatatcagattagaggaattagctattttcaataaaataacagaaattcttagagaaatctaaagagatggttattcaggtacaggatgcatttaagatatcacatagacaaaactggagcatgaatttatttgtttttttcttttttctttaaattagaaacaagcttgttttacatgtcaatcccagttccccctccctccctcctctgctgcccccccccacaccctatcccatcccctttctgctccctagggagagtgaggccttccatgggggatcctcaaagtctgccatatcatttggagcagggcccaggctgagagagtatccctccatatggagtgggcccccaaagtccatttgtgtattagggataaatctgatccactaccagaggccctgtagattgcccagatctccaaactacatccacgttcagagggtctggagcagacctatgccggtttcccagctctcagtctggagcagaagtttctgatacatattatatttaaaatactaatatccagatctgaggaaccatactgaaagctgcaagggtgaaacttcaaggtaactagaaaggcaaacacatcagagtagcatcagatttctcaacagaaatgttaaaagatacgagacctagaataaggtatttaacaagattatatccaagaaaactaggtgtcataattgaaagagaaagaaaacttcatatgttaaaaaacaatcagaagaaatcatgaccactagatgacaaacagagtaagccacgctagagcagaagataagaaaatgaagagtaggaaaataccaaatattccaataagagtgattaatgcacatctttcaaaaataaccctattaatggtttcagttccccactcaaagattcaggttcatggatttgattaataaacagcatctaactgtttgttacctccaagaaatgtgcctcactatcaaagacagatgctattttaggatggaaaaggctattccaagcaaatggatctataaaagaagcagtcattgtggttataatacctgacagagtagacatgagttaaaatcacttcatactgactaaacgaagcaatccatcgagaacatggtaacatttaagaatatatacgccaatcatgagtggacataattttataaaacaatagtcctagatgtaaaggcacagattaacctcaacataataacaataagttacctcaacattctattcttaccaatagaaattccatcataaatgatcataaacatttgaattaaacatcatagatcaaatggactcaacaggcatatgtaaaacattccattcaaatgctgaagaatatacattattctcagaaaaacatggaactgtctctataacaggtcataatattacacaaggaagtcttaataaatacaaaaaaatgatttcttatctcctgaccatgattgaatgaaattagaaaccagcaagagaaagtgcaaaaaaattacacacagttgtggagcttaagcaacacactattgattgaggatatgattgtcagaggaataaaaaaggaaagaatcacagaatcaagtgaaaattaaaacacaacaccccaaatctgtggggtgcagtgaaggtaaaaacaatcttaagagaaaggcttgtagctacaaatgcttacattaacaaattagaaaaagctcaaataaataatctagcactgaacattagggcctagggaataaaaaagaacaaacaaaacccaatatcagtatatggagcaaggtaattaagatcagggtggaaattagtgaggtggaaattgaaaaaaagaattcaaagaatcaataaaacaaggaatagtttctttgaaaaaaataaagaacattgatatacccttagccaatataaccaaaagaaaggagtaaatgactaccaaaattaatacaattaaagatgaaaagagagattccaacaggtgccaatgaaattcacaaagtccttaggacataccttaaacctatagattccactaactaaagtgaattaaattctaaataaatggagtaattttttaaacagatctataatcaacaatgaggttgaaaatataataaccccccattaacataagtccaggttccagaaggactcatattctaattgtcctgataaatatagatgcaaatattttcaataaaatacttgcaaaccaaattaaagaacacagctctgttagttccttcctcactattgtgacaaaatatctttaaaatgtgacttaaggcatggtttctgttaactaacagtttgattgtgcagctgttgtggcagggaaatcatggctacattagtttcggcagctcattatgttgcatctgcatccaggaagcagagagaagacaatgttagtattcagccttctctctcttcttgactcagtctgacaaccaagccaaaggagtggtgaggttcccagttgaattaaacaaggtctagacaatccttcatagatatcttcagaggtttgtctccttggcatttctagatcctgtcaagttgatgatcaatattagcccctaaccatatcaagaagactactgaccacggccaagttgaattcattccagaaatatgaaggtgtatcaataactgtagtaggtcacataaatgatgtcaaagacagaagtcacctgatcatcttaatagatggtgaaaagtttttttgacaaagtttaacatctctttccaataaaatccttaaagacactaagaacagaatgacaaatgtcttagtatataagacaaatctatagataacattattctagatgcataatgaaaagatagcctgaagaatgggaggtattcatctgacagaagactaacatttcgaatacatgaagaaataaaaaagaaaaaaagaaaaaagaaaaagaaaacatcaaaactaaacatgacattaaatagctcaaaaaacaaatgatctaatggaatgaacagatgatgctccaaagatgaaatacaaatgggtagtaaacacacaaagaacatgttcaactcctctggccatcagagtagggaaattgaaactatattgtaattctctgtaaccccacttagaatgtcagtcagcaagaaaacaaagagcaacacatgctggtgaggatatggacaaagggaacaaaccacttacagagaaagtaaactagtttagtcatgtggaagctagtatgagggcttcaaaaaacactaaaaaatagaatatctaccatgtgatccagctattcctacctggactcttacccccaaaactcccaactcaacatattatagagatatttggcaatcaatgtttactgcagcactatccacaatcactgagttgtggaaccaattaatgcatccaacaggagagagagaggtaagaaatatattatatattatatgcaccatggaatatttttagccataaagaagaacaaattatgtcaatttcagggaactggaaacaactggagataattaagctaattaagtcagtctcagaaaaataaatactacatattttctttaattttgattgctagatttcatatagatatgtaaaaccgtgtatgcatacgtaatgtgaaaacagaaaagaaactgtctatgggaacaaagaatgattggtgtgtatgtgaggatatgctaagtgtatagactgtctttatgcaacacattccaaaacacaatgaatatacacgatgacaatttaaaagagtatgaatgatttatcccacagtaggaagaagtgacaataagaatatttgcaaaacaaattacctactttatctaccttgagaatagtgattcctgaatatatacaattttgatagactttaaaaatccaaggataactaatttccatagaatagaaattaagtgaaaccatttttaatcctagaaactctattagtcataattctgctagcaaaatgttcagacaatgaacagttacggcttgagtatgagagtcccccatctggtatctctgttctgagaggacatgaaatctttaggagaaagtaggttgccatgagctgggcctcatgggtcacagggtagccaagtttcagcctttgcctctctgcttactgactgttagcaacatataaccaacaaccctactctttcatgttcccagccatgagcaattcctcctctctagccttccctgccactatggacagtaccctctcaaaccatgagccaaaataaatcctctctctttaagttgcttctttgggttttttttttttttttaatcacagtgaagagaaaattaattagcatacagccttgagcccaatgggaggagagagttgtaagggcagaagatgtccccagagcctgtggatcctgtggcacacacagcgattggttagagaaaaaattaagctccggtgcctgcaaatgagttgtgtgtgacggctacaaggacttgcattaacgtgggattttcatgggtctcaggataaggagtgggagcagagtaacccaattatgataggaatggggcattctagtcaaaaaagaaactctgggattggagagatgccgcagtggttaaatatcatgtaatgttgccacaaagggtccgaactggctttctagcatccatatggtgtagttcatagtaatgtgtaactccaaatccaggagactccctggcttctgaaattatctgcatccaggtgcagccccactgtccccatacacacacagttcaaaaattaaaagatgtcactttcaagaaagaaacctggcatgtgggttgatatggtgcctagttttgtgaactgatgggggctgatcttgtggtatccggactctgtaggtgtgacagcagatgttatttcctgccttcgatgctcagtcatgtatctagtatgccgggctctgtgatttcaagggaggaggccatgcctatggctgctgtgcacaggtagcagctttatcttcccagatgagttttatgaatgccccaaggattttaccatcttcactgtgaaaattattttaaaatagtttaggggatttcctggaagtttcttcctcactctccctatatggtatggcagtgatcccagaccagtcaagttcaattcacgtggtaaaccgagaagaccatctttccccaagggcgaagaaggaagtggcctatggtgcctttcgaaaaaggctctttaaatatttcattaaaccttcactggtgcaagcccatttctggctcttcaaatatttaaagctgctcacttatctcgggaaggcagcgtccgagagctcttgctagctgttggctgcaggcagatagcggaggtgcccgcctacagatgaggtgtacccgctaaaagagggcaaacagccacgcggaagctgcaggcatgaggactcctggcagagtcatagcttgtgactgccaggatcccaaggccaatcagaagtttagagattccaccactgtagatggttcccatcatctgcttcctaaatcacccactgcccagaatgtccttgcccctaagctatagccaccttgtgggagggcacttccttggagagaaagcagagtctgaactagaaatcagtgggccatctcttttgactttatcaccaattgagaaagtcagtggcaaaaaagaatgcaatatgtggttgcattaggttctccaagctgtccaaaatctcctctcctcccctcccttcctcccctcccctcctcctcccctcccctcccctcccctcctcctcctcccctcctccttcccccatccctcctccctcccctcctcctctctcctctcccctcctcccctcctcctccctccccctccctccctcctctcccctgctctcccctcctttccatctttcctcctctcccctccctcctctcctcccctcctcccctccccctcccccctcctctcccctcccctcccctcctcctctcccttcctctcctcccctccctctcctcatctcctcccttaccttcccctccccatctccttttgccttcactttctcctctctccttcctttcctgtatgtttcttctatttttcaaagagccccctttaaaatgtagttttagacttgtataaagtggcaaatacagcaatttgtatttcccctaacctagattttcctactgttaacacattagggaatcatagttcaaaaccagtaaatcaacattaatataagtctattaaattataggccctattcaatctcgccagctttctcactagtctctttcctctgatttcctcctgtgtagagagtcacacatagaggatgaagtcaacctgctgctggatctaatgagctttagcttccttcccatacaagtgtattttttttctttttcctgcgtcgctctgtatctagtattttggaagtgttatgccagggaatccaaacctccccatgaattgcttcacttcccatatgccagcatcctcaccatcttttcctctggaataatgttctccgatgtatgtgcatggtcatcttgttgccatggttcttccatactatttgggattctgtgatccaattgctttggtctgtctgtgctttgggtttatcatctgttcgctgggctcagtggtcatagcttttatgggagaaatgagttaacatttattcttgcaatttacttctgaggaatggagtcctctccagctggtagacctgtcatattgtgagtcatgaatttgaacatgatatagtgagatggtttatttctgctgcatggttagtggtggctcaggtggaaacaactcaggagagattgattacttataagagtgccttgtccattttctacatcttggtggaatggatccaggactgtgcctatttaggaccactgtctggaaatcagtgtacaacctgtctgatatggcattttcaatgccgcgagtcctattctttggtggatgactgcctgaacaaagtattacaagaccatcaaatagaagcccatggtttttctgacatagtccatgagtctactctgtgctactcctaccacattctatttactagggatatatgggctagccaggtttcaagggagacatagaggacttgaccctttcataaagtatgacaaaatgccattgtaggagagtacattatgggcacacataaggggagcatctttggggaaatacaaccctctacaacattaaataaacaatgctagcaaagagccctaagccagagtataacccttcaggtgtctcttagccacactacccttttttattaagctgtggcttttgtttgccattgacacagaacagtgatattttgatattttgtaataacaatagcaccacttctgtcctggactttcagacaccatgccctctcattttgtcatgtattttacctacagatggattttatcacattctcatgggcattgctccagccttgtaagccctttgattggctctctctgattggtctctaagagcttttatctgtgggtggagacttttggagtaggtggctcctttgatccctgacagatctcctgttcctccagagctctgcaaattcggatatgtcactaatgtggcttggttttgccatgggttgatccttcctagaaaggcattcctcagcaaacataagtgaattcctaacaatgtaggtctttctcacttaagtcaactaagctttcccttgtcaggtcatatgataaagatcccataagatggttattttctgtcatgggtggccatgacaagtgaaagctcatacttcacttagttaatgctcaactcaaatgtttcctctccttggaattaactgagtcagagttctctacaaaacaaatttctagtaacttggttttctaatagcactcactgtgattgaaattgagaaagctgattatggcttatcctctaagtgtatatgtgtgtaagccttctgagtgcagagatgtgctggctatgacctatttcccatgaggagttctaataggtgctggaaaaaggctgagcatcagagcaaacgaggttaatatcacagtcctttgggttgaaacagacagctggtccattcatccttcccaacaaaccctttgccccttgctttctctcaagtatggtaggaacaagcgttcacagtcaaggacactagctttcctctagcctctgttgaagacctgtgacaacagggcacttactaccttgcatattttggagaaaactttactgtctgcagcaaacattctgtgttctccacccagaggacaagatggccttccttacccccaggcacaatcttactttagctaacgctgttttcctttgcagatgagcctatgaaggggtctctggcttccttaactcctgtaaatgatgtgatgccctctagatcatgtgcaagccttgctggcctctgtcacccacgtttggagcagtgtgcaaatgccagctctcttgagttaagtctagaatgttagcaccagtgaatgaacttttctcatcccctccttggtgctaaatggcactctttcctcagtgactacaacagagagccatcttaacatggaaactgcaatttgaaagttggcatacagctcctggttgataactagcgcgggctggactgttaccactgttgatcacggtacctcacaagttagaaataactaagtcaagaaagtattcatgtttcaccctctctgtcaacatgaactttaagatactaaataagtcatatgtgccaagagaggcttgttggaaatacagtcacagaatggcttgtgctatcctgctgaaagtctcatggcacgctccccacggaaagtctacccattcatcctctcatccatgctctcagctatcctgccagtgtttgcagagctgatacttggtgccatgtgttaggcatacagcaagcaagagtaagtccactctgctccttgtatttgtgctgtgtctataagagaagatgctgaacacacaacctcaactgttagtttaaaaaactctgttagttctcaaagccattctaatgactaaaggggccttttcaggccagggattgaaggtgcttgccaacaaatatgatgacctgagatcaattccagagcccataccactatgggagagaacagaagtttgcagttttttctcttttatgttgcatttctccaatgattctctttctttctactaagcaagataatgcagccacatgcacacataccaaacccttccacttattatgtctgacccttacagcagtgcattctggtgcattgtaacttaaggcaggaaacatatatactatttgtattctttagaattgcatgccatatttaggacagttgagcttggttcttttattttcacctaatatgggcttatataaacagtatattttttttctccattgaatccttcccctggttctttatacacagagtgtgggacaactaataacttttgggggtctaggcaatttccagatcagagtcttgttgggctcattttgactgtattgcaattgtcatgtagggggtttaaattttaacaggcttgtttagggaaaaaaaagagaaagctttggtggagacaagacaaggcacatttaagaaatggagcagaacggctgtggacaggcctaaagaggagaggcaggggtctccacttggccttgggaattatcctatcccaactgtgtgtttgacagtttcatatgctgtagacatttgcaagtttattaaatactaggcaaaccactattgactaagggcatcccatgtattttctctgttttgtgacagtgaggaagaagctataggtcctgtgaaatgactctgcagtctatctgttctataaataaatggtatatattctgtttcaccagtgcttagagaaaacatttcacataacaccccttccttggcaacacacaatatgtaaggacaggagtgggccccattgaccttctctatggtcaccatctctggcagaaccatactttcagaacgtacttgaacttttcactagatgggacctttataaatgtgataatagtgcataaaatactgtcattttcatgcttaaagatgacacttttcattaaattctcccagcaacccttctagttcttttcaatgcagtttcaattatcaaaaaaaggtctttttaggccagcaagatggcacgaggggtaaaggtgtttgctgccaaactgacagcctgagtttgagaactggaacctacatggtggaaggaaaagagcaaactcccccaagttgtcatctcgtctccatagtttcactggatcatacgtgtgtgtacacacacacacacacacacacacacacacacacacacacacacacactaaatgtaaaatgtaataaaaggagacaggccctttcatgttaattaattagaccttttcttttttcgaatttagttgattgtcctgatggaaccacatggacaactgtagaataagcttcttcctactgcagtgtctcttctttgaatacactatcatgcgggatttctccaaccattcctttactcagctagttaactttgcctccctccaccaatccttccattctctttgtacctgtccattatgcaagccacacagttgttgcctctatgcatactttcctaatttattttgattaaaatataatgaattccctttaccctttcttgcctctaattctcctttgtcttctccctccaacccctctcacatctcccctacttcctctgaaactggtaacctctctttctttgataatcattgatatatataatatatatatatatatatatatatatacatatatatatatatatatatacacacacatcctgccaagtctgttcatatgcttcttcagggctgaccactctgtcagataaccagttaaggggatctttcttccctgggagaaaatagttctccctctctcagcagtcattatttgcctgtagttctttgcctagggctaaaatcttacaagattttcctcttctgcattgcattagcatgtctgttggtattggtattgttcaggtggtttttgaggcagtcctattgttgaggagtcatggatgtagcttctctgttatttctaggagacacaatctcacaataggcttcctggccctctgccttttgctctctctctgtctcctcttcctgagtgtttcctgagccttaggtgcagaggctatgctgaagttgtgtctgtggggtcttggatccccgtagtcagttgttctctgcatggttacgggttctcagcttgctgcaaagagaagaacatttggtgtaggctgagagctgtacttacctcaggttatgtataaatctaagttgtagatgcagttgggaatcttgctggtctagtaaagtggcagcagtatgttttcctctaatatccatgacctcactagccccaggtagttggctaggtttccagtactcaactctcattgaatggaatttaagttcaacccagacagctgtcagttactgccaaaatatgaatgccactattacactgttagggatatcctgctgtggtattcattgtgattcataggcatcacaactggatagcactgttgattcttttaccccttctttggcagcttgcatagcatctgatactctggaagctaaaacttcaggttgcatccttgtactttccaagtcctgaatctaaactgtgctgtgtcttcagcaatagagtcttatctgcaacctttgagaggtagactactatgaccagcaactcagacagaggtttctcatatctggtactggggtttagttagataatctatggctcttgtaggaaccattgtgagcacaagtggcataacttcatttaatatatatatatatatatatatatataaataaacttaatttatatattataaattgtatatggaatttacatattacaaattatgtggataatttatgatatatatttaagatataaaataatgtttaagattatattatatatatatatatatatatatatatatatatgttactatgattccttgaagctttatcaaacatcctgagagttactgtcccctctttctccctctccttctgcagtgacttcccacccattcccctccctaaattttgctgtcattttctttaatgtgtggctctggagaccgagtatattttcggtatctgatggatgattgcatagtgatattcttatgttaatcagaacattttttttaggataatgggatgttacagcttagggttcagagcgtagacccacactttcctgcagcggtgtgaccatgaaccattcgtcctactgggccatttaagctctgtcctcatcttcagcacaggatcatgctgttcctgaagcagttttgctatgaggattgacagagatatggggacaacacatttgatgttggttgtactaagaacattgagttctgatttggtaaaaaaaaaaaaaaaaaaaaaaaaaaaaaaaaaaaaaaaaaaaaaaaagcataccaggctgctcattcacgtaggaagttttacctacagaccactgttgatttctttgttagttcttacttctggtctatgtcatcctttaggccaatgattctccaacagatctgcgtactagagtaacctggaatttttggaatgtcagtgaccaggctacacttcagaagtcatggaaccactattttttgtttgttttctgttttccgagagagaatttctctgtgtacccatggctgtcctggagctcactctatagatcaggctggccctgaactcatagaaatctgcttgcctctgcttcccaagtgctgggattaaaggtgtgcgataccaccgccccgcccagtagaaacattcttatgagtgatattcatttcattcgtgtttggcaaaatctgagaactattgctgtagaggacatcaatgccatagaactcaaacatttgggctattttgagtgatttgagggacagggtgtatgcgtgtgtgtttgagggacagggtgtatgcatgtgtgtctgagggacatgtccatgctcatgcacatgcaaactagagaatattgggtgtcccctctattgtcctccagcttatttccttgagaggtttctcactgaacctgaaatttatagccctgcccccaccatcaatgttggcagccagcaaaccacagttggagcaggggttgcttcctttcaaagcacttattcccaactctctagagttaccaatttgtttggatgtgtacttaaaaatcacactgaaacatggtctttaaaaatgagcagtacagcagaacaaagctgaccacatagctgttaggtgataaaatacagatgactgacagtctaaatgtggttcttatttacagcagagttggagattaactagaattctgggagtggaatccaaaggcttcctgtagcattgaacacatcagataaagggaacatggattgctatataaatagcgatttaatgtctaggtgagtttactgtgaagcccaaagtaagcgttctttaaccttcttggactcatccctcaactttgaggttttgagatttaactaaattaagaacaaaacatgaaggatttttttcacaatttaatttttgaatttcactaagctttttaagtgggggagtataatgaatagaggtatatagtaggtgaagggctagctagcagaagaatgctttccgttctgtttgaaacatttggactcacttattctctggcttctgcttttcccctgacaagtaaggacggtgcaggtcatgaggtcatactgtgcagctgacatctaattgttcctgatgggccctggtcatggacagggtttctgtgagcacttgatagggagctgtcactcaaacaaatgcccccccccaacccggaaggctacatctgtagagtcatcacaaagatgggaggcttgtagaacacaatccagaatgttctcacacctgctgcatgtgggttgtagctacagagatgtagataaaccacagcaggagccctcctgctggaggagagccaggcttgtgatgagcatgctctctgctgtttcctaatcacaggtctcaagtatggttcacaagtccagtagcaacattagccccaggtaactgggcagaaattcaaaatctggagcccaactacagtttcaggctacaggagtctgaaacacagatggaaagggaaagaaacagagaagcactttagaccttagtctaaaggtcctcaaccttcctaaggcctctactccttaatacatactcctcatgttgtgatgacctctcagcataaaattatttcattgctactttataactaattttgctactgttgtgaattgtaatgtgaatatttgatatgcaggatatctgatatgtgacccccccccccaggggttgcgacccacactgccttaatctccccaggtgatacagaagtaggctcaatttagagcattgtttcaagtaagcctgctgcccctgtgtttaaaagcttggtccccaacctgtggtgctactgggaggtggggagggacctaatggaaagaggttaggtcattgggctgtgcccttgaaagggaggttgcaatctgggcttttcctggctcctccttttctggctatagcataaacagatattcttttccctgtgaccccacccataggcccatgtaacaagggcaagtcaccttggactaaaatcattttctcctctgaaggctggcagtgttagagcaccagaaagctgactgactatgatgatagtggggactctaggtatttgaaaactgtctggaagtgtctccttttgtggagagctattcatcgccatttttgctgttagcttctttgccaaacttaaatggtctcgaaaggcctggtctgatgtgggtctggattgagcaaaacgtagttatttttggcttaatgtatgcatggttaaatgaataattggtgccagccatgtgattgctcagccctttaggtttaattgaaacctttactttttgccagagaaacatttgaaaaggtaaaactgaacgtttgaagagtgcctgtgagtggcatttgttggcactgtgcattttccatttcaatggagtcttttgctgcccttgttacaggctctttggaatcatttgggattgaattgaagggaagggtgctggcagtgtgaactggtgtgacaaggtcacaatggccatctctctttgagccttacttcctgggttgctcaggactcatagctttaagtgacccaaactctagttggctgctggggcaactgtgaagaaaatcccaccgcttaacagcaggcgtttattttctcaccattttggaggcaggaagcctgtgatcaacaagcctgaatgtgcattttctggtgagggccgccttcctgctctgtccctgtcctcaaatggcctctccttctgcctgtggaaaagtgaagacagctccagctctctggagtgcctccttattaggccaccagtcttgtgggactggggctgtgccctctgacttcctttaccctaattactcccttagagcccttgctctgactgtagccaccctgggggttatgactacagcacagggattctggggtcataaatactcattctgtatttccacctcagtgaaacgtctctcgggcaattgagagtaattaccctgtcaaataataactgaaggcttaggaccagctgtaggattgctggatttaggttgaaatagagtcggcagactctgccctgcattatttctgtcaattttcattctttctttaaaggtgtgtgtgtgtgtgtgtgtgtgtgtgtgtgtgtgtgtgtgtgtgtgtgtatgcctgcacacaggcacacatgtgagtatgtatgcacatgagtacaggtacctgtggggacgagaaatgttgcatcccttggagctagagacacaagtgactgtgagcccccttacatgggaactgggaactatacttggattctctgcaagactattattttctcttttaaccaccaagccatatctccagccccctattatactttttaagggtgaccagatggccacatcagttttaagtacctattctaccatttacctctgtgaaaacttcactagaaatggtttaatttgaattcccatgatcttgtctctttctctttatttgtgccccaagtatcttctggaatcggttgactagaaggctggcaatgtggacttgggtctgcacaggtctgacaggatgaatggagaataaacatagaataaacatggtacaaattgtgtgtccttcactgagaggcctgtccccagaaaacttcatccttcatcctccaaatagaatttgtaatgggaggatactttttagttggtggggacatgtttctaaaattcaactgggttaaactggatgtgagcaccatgtaaagacttagccatggaaatgtattatcaaatcatgtatcttttggatttatgagactggtctggatgctgctttcttcttttaatgtttgctaaagttcttattctttgcatgagatgcacccacaccatttctcacttaattagtataattctttaataatctattttaaatccccatctctgtatttataggcattgagtttttcttctcaagtagacttatatagaggtgaaggtcagatctctgaattctgtttgtcttatgttggcttctctgagcttctagcttcataaatcatatggcaatttattcttgaaaatccttgagcatcaatggagatatttttagcaatcttggattggggggggggctctccttttcttaaatgagattgaaacccatctatcatataagatgtaagaggtttggtttttgaagagttatcagctaaggaaagatgtcataatagtgccatatgtattacaactgattaatttaacctactcttaggagggggtcaccaagataggtatattctcattaaaaaattatgagatctgagtatggtaagcattgcttgtaaatatttacctgtctgctaccataagactcagcaatctccaaaagaaggtaaaagaatgaaaaaatttcttacaataaatagtccagttatatgactatataatgtattgtttttttgattggggtggttcaaaattatgggttagaatcaagaaaagctagacaaatgagagggacatggaatctttctgttgcaactatctgataagtagtttaaattatctgtcacacacacgagaagctcacaagaaaagacatgggtaaaggagttgggagtttcaagaaaataagaaaaaaaaggttttaaaaaatctttaaataaacagataaaagtaaggaaaatataatagaggtaaaatccttgaaactttatggtgagatgaaagttatttgttaaaaagtctatagacatcatctaaagtgagtcacaaagacaaaaatagaaaagaactttcttacgacttcaggatcatgcgacctgacactcttaacataatctttgacatggagatgggacatgttaaaaaattgttggagaatcttagaaatcttcagaaattgatctaaaccaggaatgtacaaattgacgattatagttaatgaataggattttttttatatgaaccattcctaggcatatttgctgaagtccaaaggctagaaggaaatcttgctgtcatccagaaggaaaaggaacatctgctggagcagactgtgcaagtagctgccacagtggaatgatggtatctttttcattgtgaaaatgtactctgttggtctcaaattccatgctaaaaaataataacgtgcttctaaaactgaaggctaatcaggaacttccaggggattgaacacagagaattcagctctgtggtcgtagaaatgctgaaatgaagttctgcctggagggaaattctaccagatggaaacagatctactggggataaaaggcaaataaagggcactgctatttgttactgtttaatttattaaatgcagtctttaaaaaataccaaatataaattgctgaacatagtgagtattagggcatattcatatgtgaacagaatcattggctcatgttcgcctccactgccctttcttatacctcctccctggttctcttccttaaagacttctatttttttcattatttaaaatcaaccaaatgttcacacataaattaatgacaatgtgttgtgtaatttatagtgctggtagaattaaacgttagaccttatcaatagggttgggtaatcaataggtggtttataatatgaagcagctatgaaaacatcctgtcattcatggcaacatggatggaacaggcagcccttattttagtgaaataagccaggcacagacaaactcacaatccttgtgagtttactcggaggtggagtcccccaaagctgatcttttctaagtttagagtagcatggcagtgactaaagcctgcagagagtaagattgggggagggatggggagacactgatcaaggaattcatggttaaagagatgcaaggaatccagtgtgcacagtagggagactacacataacagtggtaggaggatggctctttagagattccatcgcacagaagtgacagatgatagttgagatacaatttgatttgagcattatgcaccatatatttccaaaacatttccggtgctttgctagcacatgccaatttgatgtgttcatatatgaattaaaaactttatcgggggtggtggtagtgcacacctttaatcccagcacttgggaagcagaggtagacggatctcggtgagttcgagaccagcctggtctacaagaactagttccaggacatcctccaaagccacagagaaaccctgtctcaaaacaaaacaaaacaaacaaacaaaaactatatcaggaatacatatttcagttctaatggcaacaatgaaaagtctagaacaaaaggaacacttagggactaggaatgcagttcagttgttacagtgtgtgcctaacatgctccaagccttggatttgatcccccattcatgtgcaatagcacacgtttgtcgtcatagtgctttgtggatgcagggaggatcagaagttcaaggtcatcctcagctacaatggcaagtgtagggctaaccttgggtacatgagaccccatctcaacaataacaacaaaaataaaacagaccagtgaaaatacctgaagctgctaaagagatgctgagtgatgctgagtggggagtttggatgctgaatgcagaggtgggatgctgagcagcaggtaggatgctgaatggagactgagatgccgaacatttctgacacaggcttccttctctggctaactctcctgttctctctggtttatatttctgtgagttctgtcagcctgattcagccaagattaaagatgatttgtattcagaatttgctctgatttgtatgcaatgagcatcaagcaatgattggagcagaaggcatttcagatgctttgctgctgctgagtctgatatccaaggacaagcttgtaaacaagacattatctgtcaatgagtcctcagcctttggaaacattttaatagataaatgacacaacaccccgaatgtgttctgaatcagcaccatcacctcatagcccagaccatttgtttgaaggttattctcaggtacatcttaccagcagggtggtgataattgaggatactcgtcaaacgacagcagtggctacagcactaaagccagcaatgcgcagatgatcccattttcttggtgactgattttcatgggcttcaggaaagaaaagtgagaatcaccatagaaatggagctgtggctcccagagcggcagagagaggtgttagtggtgcagtacatgtctgtgaagtgtcgcataagacaacgcctgtgacagcaacttcttgtttgagggtgggtcatctgctaaggcaaaatgtagccgtggcagcactggtgagcaaggggctatgagctaactggagagatttttggagccttaaaaacagggtctgagtgacatctgagacacctaatattctgcttcagccaactcccatcctcccaggaatgtccttcttggggtcctgcttttccttattcccctaccctagaatcagccttgctcagcattgcaggattggctaagcaactcatgtgggctaatacaaaatgaaggcacaaggtgctttgttctggtatcttaaacctctgaactccccgctagtggcacacactgtctgccctccctctttttcttatggaagcctaagcccactgtctcttctgcttcctactcttctaaaagggattgtactgtttgttctgatctgcttccttcaggcttttttttcccacaacaaagaatgcaaaaaccccagtccagtctgatgtgaacaaaggggagatggcttactctctgtcttgttctattgttcctattatattaatatttttgacaatcatatcatgttagttcatttggttacatccatttcttcccccgttgaatgtggctgccagtaaaggactccatgagtcttgtgaagattctatgagttaatattacatttaagcaggtagatgggacatatttgtaatcccaacatccaggaggtggatgcaggagaatcctgagctcgagaccaacctaagatacatgctgtgaccctgtgtcaaacaaaataaattgaaacgaaacaaagccaaacaaacaaaacagttttaaatgattagaatgagactgaggacactgtaaatgatcaaccaatgtttgcagttgtcaccactgtggctactgctgttactgatggtcagggaaagccctaaacttaattgtaatgatggtcaatcatggttccatgtgcattatccttgagcttcattgtcatttttagagtaggtttgggttattaaatatcttgtcaaactttcaccatggtacacgtactctgtcctctaggttttgtgttactgcactcaaaaagcctgtcccctgtgagctccaacaggtcatgtccctgttcggtgtcagaatagacagttccttgaatatgcccatagacaatttaaaatgcctctttaggttggcactaactgaataagttgtttcagaggaggcagagactcatctaacaagaagctccccagaatctaccatcatccaacctggccctgcacccccagagaaaagagattctctgtgtggagacagcactggcaaggcaaggtctttgcctcaggattcagactctcctggtccccagtgacctctgtacattctctcagcataagcaagaactccctgtaggcactctctaccagtttcaggttttaatatcccaaggtttctgaccttgtttgcaggtccacacaggcagattcaaaagaacactgaagtcactcagtttcctcaggagtcaagggtggcaggatcccaagttcaagacctgcttgagctagaggacaagttcaaagccagcatatgccacttagttcaaacgtaaaaagtaacaatgggacttgggctatagctcagttgtagagtacttacctaaagtgtatacagtggaaaatgattgcctcctgaaacgtgggtaccacaagtccaccctggtcttgcatccttgtgaccagtatagagttagacatggacatgagatgcatggtagaggactgaagccaaatcaccgggatcgcctcttctgcccattgaaagaatttcttctatttctgttttagtggaaaggaaagaagacagagaagtagcattttgatgctcttcaaaacaagggaagcaaacatatcattctttattaatcttgggcattcattgagccattgcttcccacaggtccagtgacagtagctcattgaactttccatttgtatgttgtctatggacggcaggttctgaatgtgtctgaggtcttggagaataaagaattttaaaaagtatctagcattttcaattggaaataccaagtttttatttggtgccttggttaatgaaccattttgagcaaaccatcctaactttcttgatattacctttttaatttcattcccagtagttgtcacagccttcatggttcttatctgtacatgtgctggtttgttctgtattgccctcagctattgataggcagctcaaagacagggagtgaccttgtctgtctcatattacagtgccttgaaaatgtaggagcttaataaatttccactgaatgaataatcagattggtagctgttttatgggcaccagcatataaatcatattttagttaagttttaataagcatatatttatatttatttttaagtatatgcatatgtctgtgtgggggtatatgcatgtgtgagtggaggcattagtattgaggcatctgtactggcctgtccttggggttctgacaggacacgccctcagctgcagccactaagagaaccaactgtgcacattcactgtgttcccttccaaaagggccctgccttcctcctatcctcctctctctctttctttctttccctctctctgttctgcatctctatctcttcttctccatctctctctgcccctctttcctctctctccccctttcatttctcctctcttctgttgcacccccttttatgatccctttccgtaacaataataataataataataataataataataataataataataaaaaccctctgcttgaaccctgtctcatggcatctttctctcttgcgctgctgcttttcttaaattacaagaggtaccaatggattccagaagggggtgtcacatcccctggaactggagtaccaggcagttgtgaagtgttcaccatgggttctagaaaccaaactctggttctttgcaagaacagtacatgaccttcaatgctgagccatctccccagcccccatatgaaccatttaagttgttttgatttgtgcagagttgtaagcaaagaacccatggtttgtaatctttagaagaagaaaaacaagcaagagagtaggagggaagcgggggaggtaaggggaagaaagttgttcaagacattaaatctatggtgggaattcagattgagccatgtaaagagtccggattgttaggttaaatggactgtgacttcagattgatctgcagagatgagtatcaagggagttccaaacaatgtgacagtgaaaccaaatccctaatggaggagtttgggttggtgtggaagtagacagagcacggtagatgtaaaagagagtggcaaggaatggagtaggacacagatgggagttccatgaagcactgctttggaaaccaaggtaagaagtttctcagttactgacagccatgggaagccaacaagcacccctgagaaacaaatggaatgaggccatcttgaatggggttcatcgaatttcatgcatccaggttagtggttgtcaatttccctgaattcagatgggggttcttcgcgctctactctcttaccacttggatctctttactagtacaggattcctccaaatgaggaacagccactgtcacgatactacaaataccgactgtttttatctactagttactgatttaagactcagaaaataacttgaaagtaattgctgaatgactttaagatcgtgctattaactcataaatttcactataaatcatagagcagaatgatgctactgcctccaatggatgactgaatatcacccttgtgtactgctatgtgtataaactaagtatgtatgtcatagtatatttttatgtacaatattttagactcagaggtgctgataagcaggtacttgtgttggttttcttatagctgagataaacacataaagagggacatgatcattttagttcacagtgggagaggttttagtcatgatcacttggctctgttgatttggggacatggcaaaaaagaacctgatgggaagggtttggtgggggcaaagctgttcatcttatggtagcctgaatgcagaaaggggaagactctatcatgcaaagcaagagagcaccctcatgacctatgtgctttgactaggtctacctcctagagttctcaccaccatctaatagtgccatcaattgggaagcaagctttcaatgtgtgtggttttggagagcatttaagatctccatcacaacaatactcaaatgtggatttttaagacagggtatttaaagtcattagagtatttcatctcgatactctaattatatcatctagcttgtggatcccttttttgctgctctgaaaaagtctattcaaagcattagtgggaaactgtagtttgcaatcattaccattgcttttaagtattcattctgtttctgtggggaacaggaagggaataaaacaacaaagtgacaattgagacaataccctcttcccttctgttgatacatctagctgagttttaaaaagagcactctccattagattcttttgttttttaaatatttccgttctcaattggcagacaccaccgttattcactttctggagagaaggtgtaacagttacttgaattcttttttttttttttttttttttttcgagacagggtttctctgtgtagctttggagcctatcctggcactcgctctggagaccaggctggcctcgaactcacagagatctgcctgcctctgcctcctgagtgctgggattaaatgtgtgtgccactgacgccggctacttgaattcttttgttttgttttgttttgttttgtttatggctaagtgaatatcttctctattcacaaagaagattacacactgttcacacaatatttgtgataaattcattatattttgaaatatcagagaatcatagctacttgcactcatccctgtgatcaataggagaaaataatacccaagaatatgagggacaaacatatcctgagtttggcctctttttctccaacttcctctgggatgcttgttttgtagacttgttcaccctctttttttgtgtgttttgcctgtaattcgttagctcttttatttatgttctttctaaaacacatctgtttacaacccatgactgtctgagtattacataccatctaagggtaatcgcacagttttcctgcttacactctagtgtaacaaaaaagaaaactcacaacatattgactttgggtaagatttgtcaatggtgctgcattaattgttcatcacttgaagcacagccgaatctcttcttcactttgactccttggcaatgtttcaggaaggtagctgttgactgtttcaaatgcccttacttgtttagatcacatgtgttgtatcctttggtttcctacaataaaacctcaaagaattataaattccctgaggattaggatccactgaataaagaaatcacagtgtctttgttgcccagaaatacatcctccaggactggatggatagacagaaatagagggactatatgtattaaatggagaataaatggaactatggtggttaggccactgtttggtgttcaacctgaattagaggagatggaaatctttaagccactgccttactcttataattgacataagcaggaacatgtgtgtggaaaggatgttgcaggagacttctatggctcacaaaatcccagttagaggaaagaacttcaggcatcctggttagaatcaggagccaaagggcttcttaatggacaaggaagccagaagtgctggtgacctctttgggaacaaaggccattcagggaggatggacatactggatttgatagagcaatgccacctgccaaagataatcttccaggcagcaataaatgccacgtgttgagagtcaagcagttaaatatggtgggccctttctgggctggattcttcctggttacataaatttatctttgtttcactggtgagcttcttctagactgctatattctgctactgatgtcatgttgttgtcttctgtgcttggaagtttcacaggaacagccacacagttgctttttttgtgttcatatttataataagaccaacatgtaagattcattttcaatgaatcttagtatgcctgtatatattatctacctttattcactgataaatttttgtgcaggtcacacaagtaggtgtatgtgggtatgtgcatgcacacacatgtgggcatatgtttgacacatctagtgtgtatcatttaggcatgtgcatatttgcagtgataagagtatcaacttattcttagctccctaaaagcttgcagcattatgatggagaaatgtgtaaaccactaactagatacattatttagcaaaacattaaaaaattgacattggatttgcagtgtgctggatttggatcctggcttccatgcgggcagtaaagatctgagatgaatcacttagtcagaacttgcccattcgtctccaaaatataacgttgccatggggattacattaacaacgatggagtgaatcatggtgtgtaaaaatgcctgttagaatgcttggcacagagtggttttagcttttaagttcttatttatgaatgtttttagagttgttggctctgaagtgaagaaataatttattgtagttgtgagcatcagagaaggaatttaaacttccctgaaggacacatgccatcttagtgactccacaggaggcagagttggatgggaaaggctggattgatagacttgtaagacttgctagaaaggcaactgaataatttgtgtgcagctgttttgtacctctggaaagggtctaactggcaggttcatatgtttctttctcatgtacatccacataggctcattaacacagggacagttatcatccggcaaggctgtggtagtgctagaattaacaagatttggcaaatagtctggggaaatctgactaccacaagatttcttacacgattgactgagcgatataagcaacataagaaccacagcataagaagaaggttttggcaggaaagatgagtgcctcttctagtgggttgaatcctgctgttgacatgaggggatggaactgaccaggggaggactgaatgggaaactgtgaaatgaggggggctgaggtcccaatagggtctcaggaaatcctacattcagacaactggcagaaagtgaactagacagcacttggaagggattggatggaattcaggaaggtccagagtcatggaagccaaagggaggaggctggagaaaaagccagcatccgctgtggcttgcagtattgttcacacagtctgctctggaacaaatgtgactaagctgcttttaactttcacataagggacagtctaaccaaaggcagaatgggaagctgtgttgtctgactgctagctttgtgcacctgaaagattttttgaagcatttggtgatgggaagagcagtgtggatgtcactctcacagatgggttcagtttgtgaaaacccactgagagttgcaccaatgacagaagcattttgtgcttatgggaaccaatgaggacttttgaattcaaaggaaagaacaagaacagaatgccctatggaatgagtggaaacagagagttaaagtaactcctcagagctgggggcaatgctaaagtaaactctctagagccagggaacaaagtgttaaagcaactcctcaggttggggaaataactcaacagttaaatgcttgtttgtgcaagaggacttgagttcagatccatgtagttcacgtaaatgctggctggatgtgaaagctggcctgtaattcaggacacaaatagtggagacaggatatccccgaagcaagttgcctagtgagactagaggtatcaaggagctctgagtttgattaaaagtccttgctctaagagaataaagtgaagaaacattgaggaaatttgccaaaatcagtctcagacacacacacacacacacacaaacacacacacacacacacacacagcatacacacatgcacacacacagcatacacacatgcacacacaccacatatgaaagaagaaaaagaaaaagatgaataattgtttgtgtgaccatcattttaattgtcagtttcatatcaccttataactgttagagttagggcataattatttatgcttgagtcatgtggctcccctaactgaagaacaaaagctttagagttgtttttaatagttccaaataaaacccatagaacatttttgctatttctatgctaggtagtatttcataatgtaattgtgtttaatcttcacacagatttagaagatcgacgtttctttcaccacatttcccagaactgaatcttaagacattggtgcatgatctacttaaggtcttaccactaggaggcagtagagcctggattcttacccctttgtgagacacagctttttcacaactgtggttcaacactgttgtcacttgagaacagagtaactatatttatagctcacggggccttgggatcatagaaatatggcatataccttctattattttcactgtcagtgtcctcctctggaaacaaactcctattgcctgttcatgattagcatttttcttcttttcatttcttaaccaattagggctgaaaattgtccccatctgacctggtacccattatgtaagagtaggcatgctactctcttttaaattttgatgtcatctgggcgttggtggcacacacctttaatcccagcactctggaggcagaggcaggcggatctctgtgagttcgaggccagcctggtctacagatagagtgccaggataggccccaaatctactcagagaaaccctgtcttgaaaaaccaaaaataaataaataaataaacaaataaataaataaataaataataaataaataaaaattgatgtcaggtagggcaaattttctcatatttggaaggcaggcagaaaaaagggggatggggagccctgaacttttagaatttctcttcttaagcagcaaggaagggtttatactttcactttggctttcctggattttcatacaaaatgtgtaacagaagtgtatggagaccagtacaaaggaaccaatccattcatggaatttcatacaggctcctttcagtagaaatgtttttcaaaaatatttcctgttacttgtgaattggcattttattttaatgtgaaaataaataaacccaaaggcatgtaattaagggtgtctgtgtgggtagtaatattctatactctatgagaaaagcaaaacaatactccattgtatgacttttctatcgcgtagtaattaaaactgaagaaggttaaaaaaaattgtgtaatcagagacaatgcctggttagtaaccacctaccacacaaaacaactgttggtaactggagaggactccagggggcaagagttcaagtttgtagtaccatctgataataaactccaatctatttccttccctttattgtctaagcaaatgttatagatacctgattgctaaaaggttcctaagaatagacagttcaagctgggcgtggtggtacacacttgaatcacagcactgggaggggagggcaggaaatggagaccccgagtccaggctcctgtgatgtgtataaacagctatcttgaggccctaccacagctggcctcgctgctctgttctaccttcccagccctgagataccatgattttccaaaatcatgagcaaaataaactgtgtctatcaggcattttgttacaatgacaagaaaagtcaataatacagttccaaagaacagcttagtacctcaagtgttgtctcttcggaacagtatattgaaaacaaaaggggaactactggtagagaacacaaatagctccagattcctgttttattgatatagtgttgaaggccagcttgattcatgacatctgtagaggtccagaataaagggcaaagagaacctagtgctgtgtccttgtcgaggcagacttgggaaggtctgtcttgatactggagctgggaacttggcttttccctctgaagagactggaattatcagttccaaggctgctgtgtgctaggtttgtgagggaattgaggcatcctgtgttctccactgtgcaacattactttataagcttcctgctgactttgtcccattgtttgatggctttttgctgactctgtcccagtttttttttttcctccttgcaaactgtatgtaagatgctgtacttcttaaaacttgcttggcacaagtcattggcttgtacaagatctccagttcccaatgttccaaacttcattattttttcatctccatccttccccttaagaccctgtcactgaagaacaacctgctggtcctagtcaatatgtgttgatttatttgtgctaaattcatttagaaagattggaaggttgttacaaagctacatttcactcaacccaaacactataaggttacccctttcactcagagggtagccgggatctgtccactccactgttggtgggtgaaaatgagtaattctttttgtttgctttttaaatgtatttacttttattttatgtgcattgatgttttgcctgcaggtaactctgtgtgtgagagtaagatcttggaagtacagacagttgttagctgccatgtgggtgctgggatttgaaatcaggtcttttgggagagcaatcattacccttaaccacggactgagccatctctccagtccgaaatgagtaattcttaaatacaggaatgcatctctaattttggcttgcaaattttaaaatcttgaataaatattgatttcaacagatttttttatttatggaggcattttctttttcatcatattgtgagttacattaattgattgtaaatgttgaactcactttccatatttgtaaagaataaatataaattagtttgtgatacattgtacttttctataatagcaaatttggttatcaaaagttttcagtgctagtccatctgtattttataaaatgattacctctgattttcctggtaaagtccttgtcaagttttctatggacagaaagctagtctcacaaaaagagctggaataggtccgatgtttttctgtttcctgaagcttcttgtattatattgattctagctgtttcctggtgtgtttgatgatgttgaccaatgaaactatttgatgtatttccactaaaaagacttcaaaatacaaatttagacttttcttttatgtatataattactcatattttcatacaatcgagttagttgagtttgtatttttctagaaatttattatttttttctaaattttgagatatgttggcacatagctgttgaaaatgtcctgttactattttaatgtccatagaatttgtgaactcttttccttttaattactatttatttttattttcatcatgatgactattatagaaccatctttttgtttgttacagaagctttattcataacagcctaaagttgaatagaatattgaactgtggtatatccatacaacagaaaagtgagtgactgatacatgaaacattgttagtggctcaccagagagttattctgagtgaaaatagccaattctcagactccacacattgcatgattttcttcaccaaaaatattgaaagtaaactaacgcagttctgatttccaggagtcaagaaatcagtaggcagggctagacaggtacatgagtgttgctcagacaggacagaatgagggatcttcatcccaatggatgtagtctgtgacttttccaaagtaaagttagtagcctatttatgagattatagtatggtttagtaagaggtttctgttgagggaaactttaacattaaaaattctatagagcattacacacaaatttgtatatacttcctatatgatttaagagttacataaggataaatttaactcatttttttgtacacagccctctgagaaatacatctctattctacttatatccttcttagcaatgtccagtccaaaggctgtgcgctctatcaacagatggctcttttgttttgttttgcttttctgcagggtataaatctaatatcctgttatatcatgatatttgaacttctgctatgtttaatctatctttgagttgttctcaaataatatgtaatcatctgattttcacattggtcgtaaaaacaactttataggtggttatgctcttggttgtgagttttaaataaataggtgaacaaatgaatataatttatctgccatctttaatgacatggctcggcaatttgtgctcctcatggctcctgatgtcacttagctttgcagtctggatccttagcagaacactttccttaacgcacatctgctgattaattaactggaccactttccatctttgactgcacacatattcagtgacctgctaaggtacatcctggtgtaacacctcttcctttacatggatgtgcctcaccttttcttctacaatccagaagcaaactgccctggtgggtgacttctattctgtctgtcttccctgtagggggctgcatcaattctggggccatattaagttatcaatgtctgttttctgaaagtaattaattacattgggtgcttcattctgaaaatgcctgagagatgctgctttgctggtgttctttacaaccaaggtcataaagatgccatcacatttcaagggactcttccaattcttcttcttcttcttcttcttcttcttcttcttcttcttcttcttcttcttcttcttcttcttcttcttcttcttcttaataaacgtcaccttcttcctttctggaattctgatgggaatttatgggaagactgcctggaagacagatttggatttatggaatcagctgagggcgtatcccaccagaaccccaaggacaggccagtatagatgcctgaatactaacacgtactagttcttctatcaaggcaaagatagaaaatattgcagagtcatatagagtttatggaacctcatggtatgaaaagtctggtgcaaatggtttgaaatagctcttgctgaggctatactatatatccctttagagcagggttatttgctcaaatctttgtataatgtctcaagatattcatggaatgttcttggtggctcttgctgtaagggtagtttggttggatgttagaatgataatccttttacttaggtcagaaaggataatccaaagcctgctaattaagaagcagaattacctatcctccttgtctgcttattcacagaaaaatggacatcagaaggcgggcctatagttctaactttaagatctcatgactaacatggagtttaactatactttatacctgcctggagacagtgggccccctcatttgtcagcttgagctatatcatttagaaagcactcatattcacactagccttgaagagatggagttgcatgtgctgaacactttgtatgcattgcctcattcctttcgctcagctgtttagtgaggtacatcttgtctctgtgtgaaagagactgagctctccagatgtgacagatggggtaatggagtaagatgtgttgttctttgggatctgatgggagccacataattatttttaacaggatggagagttctgaaatgtcccagacttcttttctgcagggatggagtagacaggacctagtccatagaaggctctgtctgccaggttccctgagtgatggcagaaacccaattcaggaaagctaagtgatttagttaaggtcctaaaactggctgaatcccaacccagtctctcttaggctattgctgctactggctacttgacattgtgacagccttaggtgtaactctgtgatataccaatactttctgctctgttatgatgtagggaacatttcactcctctgctccatagcctcagcacaaaacattgcctggattctaaaactgcttattgccattttcctatattctcctgtaacattttgccagcaccagtgggacttctagcagcactgacatttcattctcaacagcagcttttggtctgttacaggccaagacacaaatcacagtgacagttggcatttataggaaaccatctctctagttggctctgcattaggtctttcccatgttttctctctatccattcttaccactgtatggtgggtgtactcattttaattggttatttgttataaatagacaggagtagagggattttagatttctttgactggcaggaggggcacatctctacctttatgtgtatttctgaaagggaactgtcacatggccagtgtggctgtcctgaatttcagtccactgggtcccatctttcccttaagtcaaaagtcttcaacatagggtaccctttcctcatagctggtattttggctataatttctagaccttcaatttctgttgtgcagaaggtgccaaatgtgggaccagggatggccaacatgcagcttgtgacttttgtctctctgttattggtggatccctgatacgctccagcacttagaccctcagcaagttacaaaagttcatctgtgtctcctaggtgactaaaactagtctgaaggaagtaaggatgaaacaaatgcattaaaaataggacacagaaataactaaacaccttttccttcatccttgaggtaagtacatgaacaaagtcttttcactgtgctaagcagcttctgtctttccagatcttacctgatggcatctgttgcctactggtcaaacctccatggcacctctgtctgataacaagggatcccaatttcagcctttactcctgttccaacacctcctcatacttttctttaaaagaattccagaaggagctgggacaaaggtgcctacttcaactccatcttgtgtttaggcttcttgacagcaaacttcaagggatctagggttctgtttataaggtgtctgccgtgattgtcttccactgatattagttagtgctggctttagagggaaaactaattaagccagtgcctgggaattactttggatgtttcctggtaaagagccagtacttttaatgttgctcttcattcagtgttcctctcgctaaatgagtctctcatcttgctccatgcaattccatattaatatgatggattatggctgttgtttctctccctccccaactctcccaacactaaataaggttctgtcttcttagccagatcccttgggtggcctttgtaggtttgactctattgccagcatagcaattccctcccacacaggactctgcctgctcctagcttcagtgctcatctgtccccttggcattgttgaggtccccatctttactgtgtctggtgttcaggcactgaaatagaggcctacattcctcctactctaaagctaccttgaggtttatattaactcataaaaattgcttggcttcctatggagggttggcttttcccttgaggctgctcatgtgagaatgagcaatgctgctgatggcaagagagccaggaaagttccacacaccgctccatagcaagtaactcgtccctttctacttgcttctagggtttgctttcagttacaatatgaaactcttagagacgcttaaatggtgcttatgggtgcccagagataggaatgatctctgttttctcaatcatctcccttctcatacgttctgcaaactggagtctaaaaacatgcaaaatatttccctctttaagctcaccaaaaggaattcatacttagcttctaggcatctgtcacaggcctacaaatccacctgtcactgggctatccttgtggccaggggtgtggggaaaagggaaagagaagcttagtaagactgctttttaatgtagcattttgagaacaggtcagtgctatgatgggttctgcctttgattctgtttgatgattcctgctgtatagtgggcgcaaggaagggctctgcatagctgtttaaaggattgaaacttaacttgggtgagtcatttgataagagttctcattagtatcagtcactcctaggtctgtgggtctcaataaatcatttttacttgttgctaggaacagaagcatccacctcctgcaaacaaagaatacattttggagaaaatgaagatttctcatcctaaaatatttttgctttaaactctaggtatcacaaatggaaattctgcttacataattaaaatgctgtaatttttttctaagcctgactttcagttttctcaacatagtctgaagtagaaaactgaattccatcttaggaatgttaaaaatgttgggcccatcctcagaatatccataagtgagaatcatgagctcctgactttctttggattatctcccatagtccttgaagtaagtggcaagttctctaactgctactgaccatacgacattagtgtacttgagagcaatttacatttttgactgttcaaattctgaatattatacactttaggttaaaactgactcagaaacataaaagcattttctcttctactttgagtttgtgcaggtgtcctgactgtgtcttcagagggtggggaggtggggatgtgggcttcatagttgaatattttactatcagtattcaagatcacccagcttgtctaggagaaagcagcatatgggattgaggacaggaagcaaagattggtaattttctgattgccacagaaatagtagctctaaacccaaataagcaccattttctcatgtcaatcaaccaaactctatagaggtgatatatgaaagcttctggttgtaaaatccataaatcgtgtttgtatacctttagagcatgagccagaataaaactttttccttcctgaagtgacttgtatcaggtattttgttacagcaatgaaaaaaatagctgatgcattcaacagtgttccaaacatttcagagaaggaatgtttgatgaatgtacacatccccaagttatgtgtcttttgtattcatttaaaactgtttttttttttagtgtgtggtggactgtgtatgtgaatttgtgtatgtgtgtgtatgtatgtgtgcatatatgtgtgtgtattcatgtgcatacacatgtgtggataggtgtgcactcacatgtgtacatgtgcatgtaaatgccagaggtagacagggggtgcctgtctctctagttgtcctccttaagttttgagacagggtctctccatgaaccctgagctcactgattggtcaagactaactggataacaagccccagtgagcctctgtcttttcttcctgtaactaggattgggattcttgccaccatgcccattctttacccgggttctgaactctggcccttatgtttgcaaagcaagcactttacccacagagccatctcctcagtcccttctacatctgttgaaggattgtgttagccttctgttgctgatacaagtaaatgggataagcacatttataaagagagaaacatttctattgagtgacagtttttggagtttcagtgagcagacacttggcttcattgcttgtgatctgtggcaagggccataccacaacaaaggtatggtgtggagcaaactgcttacctcatggtcacagtaataagacaaaaccacagccacaggaccatagcagggtttggtccttgaattcctagcttacttcctccacattacgtttcctagtagcagcacaggaggggtcaagacctttaaacatgggtggtgttaagcaaagacttatatgtgtatatgtgtgtctgttcatatgtggataggtacatagacatccctcaggcactgctcactttgttttctgagactgggccacccattgggacttgcggctcacttgttgggctaggctgcttggccagaaagcccatctgcctgtcttcctctccctaggattgaaactcagtcatgaagcaccataccaattttgttgctatttgtttgctttttattagggtcttcagctctaacttaggtcttcgtgctttcatggctagtactttaccaattgaacaatttctttgacctgggttttagattctaagatgcaatccacccccacaccttgagagtatcattattttcaaattaggaacacaatatctatttttaatcatttttattttttcctcactaaagtttgattcatcctaaagtacattagcaatcccaagaaagtgtgacctaggttgccacgcatgttgtgcttttatttttaggacctggtgctatggagcatgtatccctcagcacaaagtggccagctaagctttagaaagaaaggaaacagcttctgccccaggctgattcctgagaaatgcctgttgctaagggcttgtatgtgcgtagtcagctcgctcaaaccttccattctgtaactttccattcattacgtggtggaggcaatgttctttctgggttgttacgtaggaaaactcgaaaagagcacaatccctaaatggtcacattattagagcagcccttgcaaaagaaaagccaccggtcaatgcgctatccacaggatgcattagcttccactgacttggctttgattgtttcttttcgctggctgaaaccaaacgattgacaaaccatgctgaagttattttaatgaattgattatctgagggacattacagaatgtggggagtctccatattccatgtgcctgtctcagccatgggtcaggtacacagtaactgtattgctcagaatacttgagtcatgtgggatttttcctgaggatgtgtgaacaaacatctcctcaacccagataaggcatgaaggggtgaccaaagacacagttccacccaattctagattggtaagccaatggaagtgtctagtttcttgcaagagtgtgagtgaagggtgactcacaggagcataggtgactcaatggcagcaagctgcatggccaaaatgcccacctcagcatggcttcaatgatgtcattgactcaatgatgcaccatcacccagagttccctgcacaacctgcaggcagcactatctcagagtctcccttcccacaggtatttactagttacacagctttgggaggactttgtgagcttcctgagcctctttagtttactgaatttccttaaaattgtaagctttcctgtttttcatttagaggaaatagcttcagaacaccaagatatttccacacataactcagtacatgcatcatattttattttctaggatataacttaatattcttaggattcacttattgttataaaactgcagaggaattttgaagtatgttaaattatgactgtagatttgcatttgtattatttaaattttctaacatctttttcatgaaaccatatgttgtatgaatacccagtaaatacatacaatgactaaaaaaatggctaaatgaaatacaggggtgaaaagcaccaggctgttgccaagactggagccttaattgcttaactggcatgtgagacaataattttccttaccgagttatttaatgtgagaagtgagaacaaaaagtctttgtagaccactggtaacttcatccaaatagaatatgatttgtatcctgataatgttttatttatccaacactcagataaaacatttgattaatggaatgtgcagtcttcagttatttagatgtcactgaaaagtaagtaatctgatgaaaaatcttctaaaatatggtatgtgcttattcctgcaatagaagcaatacaagttaactttctttaatggctcatgggtattatagtaatttatgcagaaaagcaataatttttcttggtgatttagatatgttagatttatgacttgggcatcaagtcactaaatgcccctacagttgcttgtttgcctatttagatgatctccatcaactgtcaattcacactgacctaaaatataaaggtttgaatgatattgattatagggtgaaaataaaaacaaaaatctattaaaataatattagtaatatgtttatactattataaaataataaaggattatttttgccctagaagctggaatgattgtcttcactacactgtagagaagcctggtccacactgacttacattgtaactgcacaattgcctggaatctcttctatggcagtgtggtagctttgatggccgacaccctcaactttatgtctgtcctttgaaactgaagatgcttataatgaacaattattaaatattgtataggacatgaagatttgcttttgtctccaaactggaatggtaaacatcttttcagggtgattgcaaagttggatagagttaaagcctattaaatgattattgtgtttgttaatagtacagttgaaaaatccgcttttaaatcatgttttgtttttattttagagagttattatccacttatcaaatagaaagagggaagcagaaaaaaaacatatgtaaaagctaagattgttatttcaaacctttggaaattaaaaacatatttaaaaaccaagattgtcatttcaaacctttggaaattaattggaagcagtagcttgctgctggctggagcctttgtacaggaaagctgagcacagctcctgataaaccttatcatagtgagagtgaggccttccaggaaaccaggacatacataatatgctgctgctactgctgctgctgctgatgtcatctgtgttatgtgtctgtcatagtgctttgcctccatgctgatgagtggtggcttttctggaaggtgggccacagtccagtgatatagcagagtcgttgtagatttccttagtgatgtaatgaagagtcattgagatttgagtcagttctcttacattgtgtgtatgtgtgaatgtggtctctgtgtgggtaggtgcatggaaatatgaagaaaatatgggatatttgagagcattctttacttgacaaacataacacactcaactcatcctcaaaggaggcaagctgaaagttccagtcagaaatcccatctggaccaaagcctaagattctacactaatgcacacccagtcctcccactctgtctattgtttcctgataaccttggggtacagatgccttttccccatctcaccccaagttcagtgggcagtgtttgcagtcaactttctgttattgcaagaaacatctgtgataatgaactgacacagataaaaggatgatcatggttcatgctgttaacttcctagccaggtaaatggagagaatgaggagaattttccccaaacacatccccattgtcctaaggacaagcaaccaggacctactatttttttttaatttttttcaatttgaattgaaacaagattgttttacatgtcccagttcccactccctcccctcctcccctaccacctccccaactaataccctaccattcacataccgtttctgctcccaatgggagtgtgaggccttccatagggggtcatcagagtctatcatttcctttgggatagggcctaggttcacccctgtgtgtcttgactcagggagtatccctgtctatggattgtatcccaaagtcaacacctatgctagggataagtactgaactactacaggaggtcccatagatttactgaaacctacattctggggtctggatcagtcccatgctggtatcccagctgtcagtctggggagcaagagttccctgttgttcaggtcagctgtttctgtgggtttcaccagatggtctggacccctatgcccatcactcattcttctctgcaactggattccagttcagttcattgattagttgtgggtgtctgcttctacttccaccaaatgctggataaaggctataggatggcatataagacatcatcaatctcattaccaggggagggcatttaaggtagcctctcctctgttgcttagattgttagttagtgtcatctttatagatctccagacctttccctagtgcctgatttctctgtaaacctaaaatgtctccctctattatggtatctcctttcttgttttcttctattcttccccgatctcaacctttctgctccctcatgtcctctgcatccctcctcttctccccttctcattctcctagctccctccccccaactcccttgttcccaattttctcaggagaacttgtccttttccccttctccaggggaccatgtatgtatctcttagggtcctccttgtttactagcttctctgacagtgtcgattgtaggctggtaatcctttactctgtctaaaatccacatatgagtgagttcataccaggtttgtatttttgtgattgggttgccttgctcagaatggtttcttattcttccatccattttcctgcaaatttcaagatttgattttttttttctgctgagtagtacttcattgtgtaaatataccacattttctctattcattctccagttgaagggcatctaggttgcttccaagttctggctattacaaatagtgctgctatgaacatcgttgatcagatgtccttgttgaatgaatgttcatcttttgggtatatgcctaagagtggaattgctggatcttgtggtagattgattcctattttcctgaggggtctccatactgatttccaaagtggctgtaccagttggcactcccaccagcaggggaggagtgttcccccttctccacaccctctccagcataaactatcattggtgtttttgattttagccattctaacaggagtaagatggtatctcagtgtggttttgatttgcattttcctgatggctaaggatgtagatcactttcttatgtgcctttcagacattttagattcctctattgagaattgtctatttagtttgattccccactttttaattggattgtctggtattttagagactcgcttcttgagttctttgtatattttggagatcagccctctgtcagatgtggggttggtgaatatctttccccagtctctgggctgctgttttgtcttacggaatgtgtccttagccttacagaagcttttcagtttcagaaggtcccatttatcaattgttgatctcagtgtctgtgctactgtaatgttctggaagcagtctcctgtaccaattaattcaaaggtattttccactttgtcttctaataggctcagtgtggctggatttatgttgaggtctttgatccatgtggacttaagttttatgaagggcgaaaggcttgggtctatctgtagtcttctacatgtctgcatccagttatgccagcaccatttgttgaagatgctttctttattctgtggtataaatttagcttctttgacaaaaatcaagtgttcgtaggtgtgtgggttattatcggggttttcaactctattccattggtctacttgtctatttttgtgcctataccaagctgttttcaggactatagctctgtaacagagcttgaagtcagggatggtgatgtctctagaagttcctttattgtacagggttgttttggctatcctgggtcttttgtttttccatataaagttgagaattgttctttcaaggtctcagaagaattgtgttgggattttgatggggattgcattgactctgtagattgcttttggcaagattgccatttttactatgttgatcccacctatccaagaacatgggagattcttccattttctagtatcttctataatttctttgtttggagactcaaaattcttaaggtacaggtatttcactattttggttagggtttccccaaggtattttttgttgtctgtggcaattgtaaagggtgatgtttctctgatttctttctccaccaatggatcatctgtatatagtagggctacagattttttttgagttaatcttgtatcctgccactttgctgaaggtgtttatcagcgaggagttccctggtagttttttgggtctcttatgtagactatcctatcatcttcaaatagtgaaagtttgacttcttcctttccaaattgtatccccttgatctccttttgttgtcttattgctctagcaaggtcttcaaggacaatattgaagaggtatggagagagtggacagccttgtcttgtccctgattttagaggaattgcattgagtttctctccatttaacttgatgttggctgccggcttgctgtatattgcttttatcatatttagatatgttcctgttatctctgatctctccaagacctttatcatgaaggggtgttggattttgtcaaagggtttttcagcttctagtgagatgattatggtttttttttcctcagtctatttatatggtggattacattgatggatttttgtatgttgaaccatccttgcatccctgagatgaagcctacttgatcatggtggatgatttcactgatatgctcttggatttgttttggcagtattttattgagtatttttgcatcaatgttcctgaggtattttggtctgtagttctctttatttattttcattttttggtttgttttttcttccatttctttaagggattttctcatgtcctctttgaggtcctctatcattttcatgaagatgcttttagggtcattctcttctggttcatctgcatcatgatgttcaggtcttactggtgtatggttcctagtctccggtggtgtcatattgggttttctgttgttggatatgcttttaccttatccttttctcatcctttcttctggtgggtgtagcaagagtttcttgttctcctggtgggtgtgggaccaaggttgtcttctggtagatgcaaacagatccaatactctgatgtcggtcctcttctcatggatggaggtgtcactattacccgggcatcggcagtgtttcggacgtgctgggtcctgccgggctggcagttggaggcagagctgtcacctggatccaaactcagtcaggcatgcaggtagcttgtgtcagatgactcttagcatcgaagacaacaggaaccggaaacagctcctggcctacctgggccggcgaatggaggcagggctttctctgggtgttcggtgttcagatcccgctgctgaactccctctttcttagttgtgtctttgtgtggcttgggtatcaaggttattgaagccttgtaaaaagagtttggcaatgaaccttctgcttcaattgtgtggaatactttgagaattggtgttagctgttccttgaatttctggtggaattctgcactgaagccatctgctcctaagctttttttgttgggagacttttgatgactgcttctatttcattaggggttataggtctgtttaagttgcttatctgttcttgatttaattttgttagttgaaatctgtccagaaaattgtccatttcctttagatttttgaactttgaggaatacaggttttcaaagtatgacctgatgattctctggattttctctgtgtctgttgttattttccccttttcattcctgattttattaatttgcatgttcagtttctgccgtttgttaagtttggataaaggtttgtctatctagttgatcttctcaaagaaccaactctttgcttcattgattatttgtattgttctcctagtttccactttattgatttcagccctcaatttgattatttcctggcatctactgccccggggtgtattggcttctttgtgttctagagctttcaattgtgctgttaattctctagtgtgattattctcctgtttcttcatgtgggcacttagcactatgaacttccctcttagcattgctttcaaattgtcccataagtttgggtatgttgtgtctgtaatctcattgaattctaggaaatctttcatttcttttctttttttttaaatttcttcctcgacccaggaattgtgcaattatgtgttacttaatttccatgagtttgtaggttttcttcaatttgtgttgttgaattctaatattaaacatggtggtctgataagatatagggggttattttattttttgaacctgttgaggtttgttatgttgccaagtatgtggttgattttagagaaggttccatgtggcactgagaagaaggtatattgttttgtgtttagatggaatgttctattgatgtctgttaagcccaattgagccatatcttctattagttcctttgtttctttgttaagtttctgtctggtggtcctgtccagtggtgagagtggggtgttgaagtgtcccactataagtgtgtgcggttttatgtgtaatttgagttttaaaaatgtttcttttacgaacgtggatgcctttgtatttggggcatagatgttcaggattgagacttcatcttgatggatttctcctgtgattagtaggaagtgacctccttcatttttttttgattgattttagtttaaactccaatttgttagatattaggatagctacccctgcttgtttcttgggtccatttgattggtaaatcttttcccaacctttaattcttaggtactttctgtctttgaagttgaggtgtgtttcttgtatgcagcagaagaatggattctgtcttcttatccattctgttaacctgtgctttgtatgggcgagttaagaccattaatattgagggatattaatgaccattgattgttcattcttgtttgttttggatttggtggtagtggtgaaattatgtgtgggtttccatcccttttttcttttggctgttggtaaagtgggattatctattgcctatatttttctggttgtagttaacttccttgggttgcagttttccttccagaactttctggagggctggattggtggatatgtattgtttgaatcgggttttgtcatggaatatcttgttttctccatttatattgattgaaagctttgctgggtgtaataatctgggctgccatctgtggtcttttagtgtaggtagaatacctatccaggaccttctggctttcagagtttccatggaaaagtcaggtgtaattctgataggtttgcctttatatgttacttgacctttttcctttgcttctcttaatattttctccttattctgtatatttggtgttttgattattatgtggcaagaagactttttttggtcgtctatttggtgttcaataggcttattgtactttcattggcatgtctttctttaggttgggaaagttttcttctatgatttttgttgaatatgttttctgggtctttgagttggatatcttcaccttcttctatccctattattcttaggtttggtcttttcatggtatctcatatttcctggatattttgttttagggatttgttggacttaagattttctttggttgatgagtctatttctcctgtgtatctctcttctatctcttgtattctgttggttatgcttgcatctgtagtttttgatcatttaccaagttcttgaatttccagtattccttcagattgtgctttctttattgtctctatttcagtttttaggtcttgaagtgtttccttgaaagatttgttggtatcttgtattttttggtttgtttttccttccatttctttaagggattttctcatatcttctttgaggccctctatcattttcatgaagatgtttttaacgtcattctcttcttgttcatctgcattgtgatgttcttgttttgctggtgtatggtccctagtctctggtggtgtcatattggttttttatgttgttgaatgtgtttttgtcttcttcccatcatttctgctggtgggtatagcaggagtctcttcctctcatggtgggtatgggaccaaggttcccttctggtagatataaagtgtttcaatactctgatgtctgtcctcttctcctgaatggaagcagaagtgttactggggtcttggcagtctctgggtttgctggagcctgccagctgaattcggatcccataagcagacctctggagtcaggtgtctccgattagaaaggacctacttcttaaagagttttagcagcactagtctggaaccaggacttcagaatgtggacctttggtgaacagttaagatccaagctacagtgcaggatcatgggaaactaatgaaagccaccattcagaaaagaggatgggaagccaatctgggaagtatctcactggtgaagaagagaaataagttacctggctcatggcaaagggaaatgtgtgtgtgtgtgtgtgtgtgtgtgtgtgtgtgtgtgtgtgtgtgtgtgtgtgtgtttgtgtgtgtgtttgtgtgcacacgcacgtgtgtgtgcgatcccatatgcactctttgagaattttataaaatatattttgatcatattcttttcccatatataaagggagtttaaatggagttacagtgtaatgggagagacaatattttaactagacatcatatgccaccaaataaattccccagtatcaggaatgagttacatctttttaagtcattggttaaaggggtcccatagacatcccccaccattatgggctattaaaatcaccaaagagtagttcttttactgacacttttttatggcatttgtacatggcccaggccatctcttccattactcatcgaccttgtgtccactgccacagatcctcaaagattgttcctactctcagcttgtaagcttgtaagcttccatcattgatggaagtcagtgcaggaactcaggacaggaaccaggaggcaggaactgaagaaaatgttacagaggagtgctgtttactgccttgctcttcatggcttgctcagcctgctttcttatagcaccagggactatcagcctaggggtggccccatgcatagtgagctgagccttccaacaggaatgaacaatcaataaaatgcacaccaggcttgccaacaggacagtctggtggagcattctttcaagcgaggttccctcttcccaaatgactctatcttgtgccaagttgacataaaagtagccagcactgaattaattagttctagtgttaaaactgctaccatagaagtaactttttaaataaagtattatagaggttaccactaagtattacaaagtatcaggagataaaaaaaaaaaagatgggaagacttttctgttcagccttaggtgagatgccgtagctgtagctggtgataaaaaaaataaagcaaaatgtgcttctgcaacatgcattgcttctactgggccttttctttggttttcttcttttgtatgtaaccattttgcttattgaagacatttattttgtgctcctcttatctttgccactgaatacagcaatacaattacaaggcagccaatttccttttccccctttgttcgtgaagtcaacatgataaaatatttggttcatgttattgctttgccagtgtcagagagataaataccggtaatcaaataaaaaagtaacaccaccatcaatatggatttggccaccattgttttggttctgtctgaccctgatctacaagcaattcacttcacctaattgtttggctttccagaataacttttaacctggatgtgtgaaagatgacagatttggggtaattttgatattttggacaggaatttgatgtagagccatctttgtactttgatgattcacgtccctttcttcttggggattcagaccaaggagactttgattagctttcaggattacgaagcatatctgttttacgtactttaagcaagtatgaagcaacagtgctgttttgtgaagagcagaggtactcaggctcctttcaatgttaaatgttggggttagggggtggctcagttggtaaagccattaccctatgtttgggacagggtctctgatgaacttggagtttactgtttggttatgttgcctagccagcaaattctgggagtctgccttcttctgctctgccttattggtagggttaccgctgcataccacaatgtctggcgtttacaagggttctagtgatccacactctggttttcatgcttgttcagcaggtccttgactatgtgagtctcattcttgaccacatatgcaccataccatcttatactgctgcttttccttgctatctttgcttccctgtgctgtcattcatgacttccacctcctgttgtgctcttttggtcatgaatgtagacatacacacatcttacatcccatttttctcaatgtaaatgaatttcttttatttcccatgaaaaagagtatataaagcttaaaccaataaatcttgtttaggaatgaaatgtgtattgtcatccattgttgtgaccaaataagatatattcttaaaagagatatttcttgaaagtcacactatttgataaaaaaaaaaaaaataagagattggtgccgggcattgttttgtgtataacgtgttcttagcagtgtgaatctgtttggcctgaaatgcttctttaagagttgctgctttccactgtgtctgcctaatctgagaaggagcccccactgatcctgctgttaaaagccctgtgaactttaaagtattcagtctctcatgctccagctctccaggatcagcccacaagaaggactagtattgactatcaggttgcagtttccaacagagccaatcttctttgatttttcttctgtaaaatccatgtgtagcttgtacctgacccaaaccacattttatttaaagaatggtcttaagcagcctctagaaataataggaaaaagccagttatgataacacaaacctataatcccatttctcgcagaagtccaaagcaggaggaacactggtttgtctgagactagcccaggccacatagggagaggcatttctaaaagccacaaacccattcctaaaagccatcaaacacaaagccaaagcaacaaaatgaaatttaaaaagaatgatgtaagaaaataattgagggaaactgttgaggcagataatgcatttggcatattggtgtcaacattctagtttgatttgatgagggttcaaggctttgaattgaggcaggatgtggggaagggtcttgtagctgcagggtcttgcatttgtttctcccacaagtcactgagcctagcttctaggagttctgcttttcacatgtttggaacaggcatcccttttctgtttgctgttcctatgctaggctacctggtccattagcttcctgaaattttcttgtgtttgtcttatattttaccacaggagttctagaattacagatgtttgttatcatgcccagttcttacactggttttgaggcttcaaattcaagttctcactcttatatagtaagtgttttacctgatgagccatctccctaccccaatgtagatgttttaatcatgtcttaaaaaacttgctcaccagatgtgaatgaagattttggtgttggtatgtcttagttaggatttctatttctggaaatagagacagaatgaccatggcaactcttataaaggaatacatttaattggggtggcttacattttcagaggtttagtccattatcagcatggcaggacatgatggcatataggcagatatggtgctggagaagttgctgaaaggccttcaccttgatttacaggcaacaggaggtggtctgagacattgggtatggcttgagcgtatatgaaaccacaaagcccacttccacagtgacatacttcctgtaaaaagaccatacctcctaatagtgctgctccctttggtggccattttcttttaaaccaccacatggtgaaaacatttttcctgagtcaatggaagcagctaccatttgttgtggctgctgattatggatgcattgacagatatgcttccttttcatggatgagttcttactttaaggtgtgcttgataatatgtatgaagaaccactatgaaacactggtcttgaatttcatgctggaacaatacagtaggaccctgttttaaatcagaacacatattctctgtccacatccttggtgtctgtttatttccacctggtttttcacactgttcagtgatgagtcacctacttttcatcccttggaagagagcagaacagtattcatcattctacacctgatatgaatttgatgaagaagaagtgatctttcccagatcagtttggctgctcatgggaaaggaacattgttgaaaccctgggttgaattatagtctgaatcataaattggtcaggcaagggtaatggaggattgctttccaaagttacagtatctattctacacatttccagattggaaccatgtgtctgataggtaataaaaggaaagggaacctcaagtgaatattgtctgaaccaagaattccagatccatatcacttgattacggcacaaagttctaagtagtttgtcaaaagtacgaagaaatggaccaaggaatagtagacctctttgccacgttgattcactctttcttaaaggcacactgatttcttgcttgctgtatgtttgggccacaatatcttcctccttcatttcccataaatcatgcacctgtttgtatgccgagtgtctcgtctgcagttaatggtgtatgtttctcaatgctagtcacctcctcttagccatgctttccaaactgggccttccacatggcttacctatttgtgttccttcgcatggtccagagtaattgtttcaaacttttaatgatcataatagcccaatttgaaaaacttatttccaactattttcaatatgaatactatgatatgaaggtgtgtagctgaacagatgaacaagtggactggatgactgtttctgcctggggtagttgggaagtttccatatgtggactagagtgctcttgaagttcccgtatgtgccctgttcttgaaggttgtttatgcatttgccaataagggacgagagaaggctcttgataggtggaagagtatatggaattaatgaaaacaaatggtaaataagaagaggagtcaatgtcttgtgtacagtgaaaaacttcgagagaggaagaatatgatgggtaatgggatgttatagccacataaggtcagagtaagttatgaatggtttaaaagctcgattaaggagaaatggaagcattacaatttcttggacaagcagctgatgtaacaaacatagataatgtgttcacaaataatataaaggattaaaacaattacctttccttggtgaacaccatatggcattgtcaagtttgcaagttccataaaactcaatatatttgaaaaaaataagaataagctcctgggtgctattttgagaaacagtgtacaacaaaattaatacatgcagaggcagacaaatggcttcacagatggatttgcagtaaaattgatttttatgaattacagtgctttggggaactccgggtatttttgtttaaatgacctttaatgtggtctttggggctggaaattatacttctaatctcctggtatttttgatcctgtaatttcagatatctgaagagtaagtgctattgtatcataatggctggatggagacaagtcccagaactcttgggggggaaaataaataagggcaagcaaagtgttttactacagtttcattaataggtctaacatgccatccacactaaataggtgctgtgtctggcaagtttccctcagtgcttgcattcacacgttcattcagtcaacactaaaatgctgcccttcatttgacaaatattatcctttcactctcataccaaacttgtacacttttaatttaaaaagtagacaaaaacagtttttggccagaatctaatttagggtctataattatttgtgcacttctgtgggtgctgttttgtgtttggtaacacgcaaaatagacctgtacagtaagtctagctatgagaacccccaaatgggcatccaccaataagtagagatgtgatgcttgtctgtggggccctagattcatagctcagggtcaacgaagttggttgtaaagagccagatagtgattgtgtttggttttgcatgccattaggtatctgttacttccaaagtctgctattgtagaaccattctggttgcttttgtggttgactacatctccccttggcatactgatccatcaaatgccctccattccatctctgctgtcactggcagtaactgccagtcactgacctcaattcctccatcacctctgtctcctctatgttcatgttatctgctatgcctccagtttttctttcagtgtaaattctcagatctgggcaccttcaataacagcccaaggtgagagtctcatcatttcctacctgatacatttcgatggactctggtcaattttcctgacacttgaggatattagcctggaacgttttctaaaatattctgaatcctccacctcttctgagcactgcccttgctctcattggccaactcctttattgcagtactcataaactctgaggtcagggtctttcttcatcctgctcctgcatgcctgtcattatttccctctcctagccttacccaccctttctttttccccgagtgatccaaatctgctggaagtcaaagtgttctctctcagtccttctgcagtaatcttctttgtctaatactcttcctatgtcctttctggctcctttcctccttgctcataggattccatttaaagattattctttacatcagattttctttatctcccaaccccaaacccaggtctaatatctcccatggtttcattcccctttatccttattcatgccccagaccagtacctacacacaacattggcttcttacctagcttgtccaccagaatggtacccatagtgcaggacccaccactctcctttactgcttgtgttcaggaacagaacattaagaccttacactgactatctggtgcaaaatgccccccttagaacttaaaatatagatgactaacagaatcacccctttattttgtatagtgtcagtgtagccttggaatgcttctgacactatgttattatttttcctaagaaatcaatttctattcaccccagatgaagaaagcaatgacaggcaaaagaaatgatcccatccagatacgacttgatgaaacaaggtgattcttgaggttacttagtggagcatagttggctcaggtagctgtgctgtcaaaaagcctaccccaccattgatgacaactcatgatagttgtattactgaaattctttgtgcaactttcaggcagctaaccaaataatccatcccatagttgttatttactgcttatataaataaccttggggacttaggcgggtgtcatagtcttgtaagctttgtgaatctcctgagcattgtaagtttcctaagagttttatgaacctcttgaatgaaaggttgtctattcagtctggagtaaatatctaccccaaacctcaacttcttccaaacatttcttaaatttttgcttctctttgaggcttttaagtagaggtattttaagggacccataaagacattcattggtcatgacaagttatcacgtaacctgagctggactactccgtgtgaagcattgtgcttgtttgcacagcagttgcaaactgctgttgcaaacttgagattagagtctcgatgctcctgatcagccactggcctgaaaaattccttatagacatcttatttccatcttgtgaatgaatgaaatccatctgtggtttatgtgcagatccacaaggcttatttatcattagtggatgtttattctgagtgacatttaaatgggaaatgcattatctttatttctctaagtgccaattatatgagaaagatttatataaatgtaaatatgtagggttgtggtcaggcacatttaatgggtgatctgatcagaaaatagtagtaagaacataggcaaattggacatttgtaatagtcataatagtcaaaatacagtgataaagaaccccccgaatctctttaaagtttatttttatttcttatatcacatcacatgactggctctggcatttaggagtactgcttgtcatgtgacactgaggaattgcttctatgggaggacaaagaaggtgtccttgcatcagtaggtgtgtataatgcttggtttggtgacagaccacactcccaactagaaccacacatgtatttccagtaagccccggggatcccagtggtaccccccttctcttttccccagttgacaagagtgtgcagtatctgggaaggagcatggcagcactctcaacactaagggccatacaagtcagaaacaccaaacccaccattttgtagccaaagtcagatgcagtgtttaaaggctccaagagtcacattcagtgatgaaaatgagcagttgctgttgatggtgttctcaatatttctgaatactgtgaaatgatcttggttagtacactaattttcagtctttaataagtaacatcttcaagggtggacaaaagacatcacccaagacctgtatttgagtctcacaggtctacttcactgaataccaagaaaagaataaaccttgagcaaccaggagaatgaagaactgaaaggtatgaatattcctgccacctgctgtttaggggttatagaagggactatgagaaaccccccatcctgtcaataacagtgcagctgcgaggtgctgagtgatgcatgaaacacacacttaaatacttagctaatataaagtatttcatagtggaataatattacactatggatatatatatatatatatatatatatatatatatatatatatattcaaattaggtactagcttgattcacatgtcaatcttttttccctccccctcccctccagcccccgaccagccctacactccctcctctttcagctccccatggagggtagggtcctccatgtgggctccccaaattccacatcatcatcctgggccaggcctaggccctccctcatgtgtccaggctgagagagcatcccttcacatgggctcttaagtcccttcttacacagggaaaaatgctgatccactactaagggtcccatagagtgccgaggcctcctcgttgacatccaaattcaggggtctggatcagtcccatgatggcctcccagacagcagtctggggtccatgtgctcccccttgttcaggccagctgtttctgtgggattcaccagcctggtaccgacccctttgatcttcatttctccctttctgcaactgggttccagagttcagttcagtgtatatctgtgggtgtcagcatctgcttccatcagccactggatgagggctctaggctggcatataaagtagtcatcagtcagggtagcccctccaacattgcctagattgtcagttggtgtcatccttgtagatctctggaaatcttcctagagtcagatctctccttggacctctaatggctccctctgttatgatatctctcatcctgctctcctctattcttcccccccgactcaacatttctactctaccctccatttcctgctctcccctcctcttctcctcctctcattctgccaactccctctcccctacactcatgctctcaataagctcaggagattctgtcccttcccattctctggggtccatgcattttccccttagagtccttcttgtttcctagttcctttggtgaagaagattgtaggctgctaatcctttgctctatgtctaaaattcatatatgagtaagtatataccatgtttgtctttttgtgactgggttacctcactcaggatggtttcttctagtttcatccatttgcctgtgaatttcaagattccattgcttttttccactgagtagtactcctttgtataaatgtaccacattttctctatccattcttaagctgaggggcatctaggttgcttccaggctctggctattacaaacaatgctgctatgaacgtggttgaacatatgtccatttgtatgaactttcattatttgggtatatgcccaagagaggaattgctggatcttgtggtagactgattcccattttcctgagcaactgccatactgatttccaaaatggtcttacaagtttgcactcccaccagcaatggaggagtgttcctttttctccacatcctctccagcataggttgtcattggtgtttttgattttagccattctggccggtataagatggtatctcagagttgttttgagttgcatttctctgatggccaaggattttgagcactttcataaatgtctttcagccatttcagattcctctgttgggaattctctatttagttctgtatgccactttttaatttcattgattggtgttttggtggcttgcttcttgacttcattgtatattttggaaatcagccctctgtcagatgtggggttggtgaagatcttttcccattctgtgggctgtcattttgacttactgtgtcctgtgccttacaaaagcttctcagtttcaggaggtcccatttattaattgtagatctcaatgtctgctactggtattatgttcaggaagcggtcttctgtaccaatacgctcaagggtatctcccactttctcttcaagaagattcagtgtggctggatttatgttgagatctttgatccatttggacttaagttttgtgcatggtgatagatatggatctatctgcaatcctcggcatgtcctaatccaattgtgccagcaacatttgttgaagatgctatcttttttccattgtatagatttagcttctttgtaaaaaatcaggtgttcataggtgtgggttaatatcagggtttacaatcgattccattggtctatctgtctatttttgtgccaataccaagctgttttcaggactatggctctataatagagcttgaagttaggaatggtgatgcctccagtagtttctttattatacatggttgttttggctatcctgggttttttgtttttccatataaagttgagtattgttctttcaaggtctgtgaagaactgtgttgggattttaatagggattgcattgaatctatagattgcttttggcaagattgccatttttactatgttgattctacctatccaagagcatgggagatctttccattttctggtatcttctttaatttctttctttaaagactcaaagttcttactgtacaggtctttcacttttttggttagcgttatcccaagacattttgtgttgtttgtggatattgtgaagtgtgatgtttccctgatttatttttcattgtgtttatcatctatatatagtagggttactgatttttttagttaattttgtatctcgctactttgctgaaggtgtttatcagctgtaggagtttcctgatagagttattgggtcacttgtgtagactatcatatcatcttcaaatagtgaaagtttgacttcttcccttccaacttgtatccccttgatctccatttcttgtcttattgctctagctagaactttaagtacaatattgaagagatatggagagagtggacagccttctcttgttcctgattttagaggaatagctttgaatttctctccatttagtttgatgttgactgtgttttgctgtatattgcctttatcatatttagatatgttcctgttattcctgttctctccaagatctttatcatgaagggatgctggattttgtcaaaggctttttcagcatctagtgagatgatcatgtggtttttctttttcagtttttttatatggtggattacattgatggattttcatatgttgaactatccctgcatccctggaatgaagcctacttgatcataatggatgatttttctgatgtgtccttggattcgatttgccaatattttgtcgagtatttttgtgttggtgttcatgagggatattggtctatagttctttatttagttgtatctttgtgtggcttgggtatcaagtaattgtagccttgtaaaaaagagtttggcaatgtcccttctgcttctattgtttggaaaaatatgaggagtactggtattagctcttgtttgaatttctggtagaattctgcagtgaagccatctggccctgggctttttttggaaggcttctgatgactgcttccatttcattaggggttatagtttgatttaaactgcttatctgttcttggtttagttttggtaagtgatatctatccagaaaattgtccatttcctttagattttcaaattttgtggagtacaggttttcaaagtatgacctgaagattctctggatttcctcagtgtctgttcttatactccccctttcatttctgattttgttaattagcatgctctccatctgccttttggttagtttggatagaggtttgtctatttggtgatcttctcaaagaaccaactctttgagaagttggtacaaagaactctttgattctttgtaatgttttcttagttcctactttattgatttcagccctcagtttgattatttcctggcatctactcctccgtggtgagtttgcttctttttgttctaaagctttcagttattctgtcaattctctagtgtgactattctccagtttcttcatgtgggcacttagtgctatgaacttttctcttagcactgctttcagagtgtcccattagtttgggtatgttgtgtctacattctcattaaattctaagaagtctttaatttctttttttacttcttcctcaacccaggaatggtgtaattgagtgttattcaattcccatgagtttgtaggttttctgcaatttgtattgctgttgaattctaatcttaaagtgttgtgttggtctgataagatacagggggttatttcaatttttttttgtatctgtggatgtttgctatgttgccaagtatgtggtcaattttatagaaagttccatgtggccctgagaagaaggtatattcttttgtgtttggatggaatgttctatagatgtctgttaatcccaattgggtcataacttctgttagaacctttgtttctttgttaagtttctgtctggtggtcctctctagtggtgaaaatgggttgttgaagtctcctactataagtgtgtgtggttttatgtgtggtttgagctttagcaatgtttcttttacaaatgtgggtgctttcatatttggggcatagatgttcaggattgagacttcatcttgatggacttttcctgtgatgagtatgaaatgctcttcttcatctttcttgattgattttagtttgaagtctaatttgttagatattaagattgttacaccagcttgtttcttgggtccatttgattggaaactcttttcccaaccctttactctgaggtaacacctgtctttgaatttgaggtgtgtttcttgtatacagaactaggatggattctgtcttcatatccattttgttagcctgtatcttcgtaggcaggttaagaccattggcattgagggatattaatgtccattgattgttggttcttgtttgttttggatttattgttgggggtgtcattgtttgtggatttctccctcctgtttcttttcgtgtttggtaaagttagattgtttttgtgagtgtagttatcttcgttgggttggagttttccctccagaactttctgtagtgctggatttgtggatatgtgttgtttaaaactggttttgtcatggaatatctcgttttctacatctatagtaattgaaagttttgctgggtacagtagtctcggttggcatccatgttcccttagtgtttgtaggacatctatccaggactttctggctttcaaagtttccattgagaagttgggtgtgattctgataggtctgcctttatatgtttctttacctttttcctttgctgctcttagtattttctcctttttcctgtaagcttggtgtttttattattatgtggtgaggggagttctttttgtggtccagtctattgtaagcttcttgtactttcataggcatatccttctgtaggttgggggcattttcttctatgattttgttgaatatgctttctatatctttgagctgtatttcttcaccttcttctatacctattactcttaggttggccttttcatggtgtcccatatttcctggatattttgtgttaggtatttgttgtacttgaaattttctttgctcaatgactgtatctcctctagcgagtcttcaacaactgagattctctcttccatctcttgtgttctattggttacactcacatccttagatcttatcgtttatccagcctttgtatttccagcatcccctcattctgtgttttctttattgtttctatttcagctttcatgccttgaactgttttgagtgcttccttcacttgtttggttgttttatgtttagattctttaagagaattaattatttcttgatttttttgttttgttttttctactatttctttaagagattttgtttcctctttaagggtcttgaacatcttcataaagtagatttttacatttgtctcttctttttcctctgtgttgtgcttttcagatcttgctggtatgaagtccctagattctggtggtgtcatattagtcttgctgttgttgagtgtgttcttattctgccttcttcctatctcttcttccagtgggtacaggtggggtctctctatctactcttgtcacctggtggtgtgtgtgggccaagacttcaatgcctgcatctctggatggtcttgcctctcctggtagtccctcattcaggagaggtcgggccagtggaggaggaaggaaaagtgaggtatttccagactcagggaggttctccctgtctgggcaggtccactctatgcaggagcagtctcagagagatcctgggttattgggggcattgggcaggagtagttcaggagcaggtacactcacctcagaataggtcaggccagtggagggggaagaaggaatgaggtatttccagattcagggtggtcctccctgtctctggagaagtcaggctggtggagggggaaggaagagtgaggtatttcaagactcagggaggttcttcctgtctgggcgggtccactctatgcaggcacaggcccagagaggtcctggggtgatgggaactttgagctggggtagggcaggagcagttacatgcactccagaagaggctgaccctgcccaaacctacagttttgtgcaagaagattatcagttttacagtatcaatatatatgagggactagcagttgccctacttttttttttttttctggctagctagctttcaaaacctaagcaaaaagatttagggcctgagatgaatctgactttcaaataattctatttgaatatttttactataactattgttctaaagtcagtctatatgctaatatggagtaaaaaaaatacctcctgaaatgggttggatttgcacataatataattgtattcattactatagtttctattctgaaacaagttgcaactattttaccattgctcatcaccatatggttccacattattttaaatgtattaatatggtctgacatgtgatgggaggacaagggatagtgaagtctctttagcttacttattcctttggtttctgtgtgctcactacaggaatgaatagagtgactcagaagtgatccccattattctctcctcaactaccagtctctgttgcatgtgaaacagatgttcccacccaccgtgttactcattcatccaaaacatatattgtttcatcaccatgggtacagagtatggaaagcagagttgattgctcctggtggttaccgtgtgaaaagctgaagaccatttatgtgaagaacttactttgagaatagagagtggttagcagctataggaagaggtctacaagttaacagaaaccatggcagtagggttagtaagaagatgctcacaatttctacccatgaagctcactaatttcatttttcactttcagcttttgtgtttctgttgtatgttgctaccaaacacctgagatttctgtttctttgattttctgggttttgttttattaagaccatgagtcctacttagggactggctacaggtgtgcctgaccacgctttcgagggcgtggtcagggtgacgtagtgtgactgcgttttctctttcggtttcactttgatacttgctggacagactgctgccatgccggctggctaggtcgctctgtaagtaagacttttccctattaaatacccttatatttccacttggctccctattggtaatttcccactataaggtttatttagactttcaggttcatagtgtttagcccattagagactagagctcccaacctatggggacagtgccatccatattcatgactgattattgtgtctcagtttatcctttatgaaagtctttcatagacacacagctgtgaccaaatctctgaggtggttccaattcaattcagttgacattgaaggttggctattcgaaattgattccttgttagcctgatatacatctttgtcactgtaaccataacctactactcctgcccctgcaaaagtcttatatccatcccataatgcagaatgtatgcactgtgtgttcattagtcttcatagttttaacagtcttagctttatgcaaaagtataactctggagtctttactgagactcaaggcagtctcttcactaagaatacccataagacacaaggccaacaattgctattccaaatggaggagcaagaggatggcaaggaaaggcaaggctaaagtaagaccaaaactgaacagggaagacgtgaacccattatctccatgtccagcatctggggcacatgacatagcagcatcatttaagctacagcaagcacacacacacacacacacacacacgcgcacacacacacacacacacacacacacacacacacacacacacacacacacacgattcctgctctaccaacatttgaatcactccctgtgtcctttggaagtcttgggtttcaaggcaagcaattggacaggagggtataacaggtgtgatcatttgatcattcttagagcccctgcagactcacctcattgcagggttccctgcctagcaggcagctgtgagttccatgctgtaggtttcttgctaccaagtgggagagcagatttcaaatagcaaatttagcatcccttcgtgggtatcttgtccatgcagccagataagcagcacttatgtaggcagacccagaccaggacatccgctgagatgattagatttctgctgaggagtgctggttctttgaaagcagtcacccagggggttaacactctgtctcagttgctttgtggaatactgcattcatggcttcccaaggagggagtttttatagattcacaaggccacgtctgtgattaaacccctgagtcacagtaaatcataataatgtctgcaagtactacagatgaagctattgctagttgtagttgtgaggtgtaagactgatagagtagccagtcttacctacagtgtgtgtgtatatgtgtgtgtacatttttgaaagtgaaagaacctctgcaagaaaggttttgtatgtgctcagaaaggggctgggactgtagcgctgtggtggagttcatgcttagctcatactagatcttagggtttttccccagtaaaacacacacacacacacacacacacacacaccaaaacccaagagagataatgcgtacatttatgttgagatactggttttaataagtatggatgaaaatttgaatattttaacagcaagaccaatagctcatcttctagatgcaatttgaaaattgcttttagtttttcacacacataaaagcaaataagaaacttagtagagtttatagagcaatctatttcaatcgattgctgtcttagtgcatttgaatttttataataaaacatccaagtgtgggtgacttatgacaatagaaaattactcgtcacactgtgggttgcagagtcttataccaaggtacctgcagcttaaatatctgttgagggacctctccttggttcatagatgacacttaatgtgttttcatatggtggaaaaagcacatgggctctctcaggtgtcctttaattaataatcaattaattaattgtattcatgaatctttgtccttcttaggtagtcatgtcctgaataacttacctcctacaactgtcacactgggttttagacatcaatggagattttatggaaagtatagcattcagaccatagtaattttagttttttagtttgcttattcctatggaaaacatacactccttgcttgccttaagatttcattcagaactgggactggtttgcgtacctggagacaggcaaaattgcaatttcaggagaccctgggatgcatagcgaggctctatctaaaaatttaaacaaatgaaacttctattcagagatgccttgaatgaagagaatcgggggctaagaataagctgagtgaccttaaatgaaacacccttaaatgagttcccccaggtctcagagaatataccaggagatataaagaatgtaagcattggatgatggataatggagagaatgacaatgatttctgggcacgacatggctgtggcactcatgaattcatagtaactacaggtacctgtggaggacctccacaagactgaacctttcaacattcaatctctgatggagggagggcttgaaaggtcttgctcctctctggggacctttggcagcctcgggatggtggaagagagaaggtgtttgatagtgtttgagaaggattaggagatgtgtctttgttggacgaagtatatccttttttgaaggaggtgtaatgtgggaaataccaatacagatcaagatagaaatacaagggattttaacagggaaaaagccttacttacagactgacctagccagctggcaggcagcagtctatacagcaagccaaaagcaaaactgaaactgaaacaagccaactgactgagcctcattctacattatcctgaccacgcccaggcacacctttagccagcccctgagcaggcatggctacaacttcccctacagaggtgtgtcactgggtgtgggttttgaggttttaaaagcccatgccatacccagtctctttctgtttctgcctgtaacttgaagatcagatgtgagctctcagttacttccctagcactatacctgcctgcaagatgccacacttcccaccatagtgataatggactcacctgtgaaagaacaccctgattaaatgctttcttttataggagttgccttggtcatggtgtctcttcccagcaatacaacagtaactcagacagaaatagcaccatggactggggtattgctgaaacagacctggccgtgttttttgttgttgttgtttgtttgtttgcttgtttgtttttgttctttgagatggggtttctctgtgtagctttggagcctatcctggcactcactctggagaccaggctggcctcaaactcacagagatccacctgcctctgcctcctgagtgctaggattaaaggcatgtgccaccaacgcccagtggccatgcttttataggagaaatatggaagacattgggactttgtcctagaagagtggctggatgctttaagtggggttaatgggacattctagtaggatcatggaagacagtggtgctgagggcaatgagaactgtgggggctcagatcgagaggttttcgaggggaagaatattattgtctgacttagagaccactcttgtgatattttggcaaagaaggtggatgcttcctgtccttgttctaaaaatctgcctgaagctaaatttcagtgatgtggatttatgaccctggcagaggaaatttcaagatagcccaggattggctgtgtcacatggtgtggttattcgtgataactctcatgtagatctacaatgaaaagaagaatgtggggcatagagaaacacaaatgtacagtgtgaggagaaaaagagcaccagaaaatgcaatattgaagtcatgatctgtcttcaagaagataaaaagtttaaagaaaggcccaattcaaaatggaaaaaagagagtgatgtccagttctcagcttaactgtttgagaaagattaggtggtatggccttgttggaggaagtatggtcttggaagaagtgtgtcactgggggtgggtttaaagtttcaaaagcctgcaccaaacccagtctctctctgcctgctggctcgggatcaagatgtaaagctctcatctactgctccagagcaatgcctgtctgcttcctacaatgatgatcaagaaataaccctctgaaactgtaagcacacgcccagttgaatactttttttttaatataagagttgccttgatcacagtgtctcttcatagtagcagaatagcacttaagaaagaataatcagctgcgattaacaagagagcagcaccactgaagtaaaatgtttcttttactgggacaattgatgctggtcagctggagctgagaagttagaaatagttaagaagagacgggcattaataaggtaaaatcttcggggaggtgttttctcaaagtcgctacacatctgtcttccagaggcagtccagatggtgccctctgttggctgctgaacttggtagtgtaaaacactgggagtgaattttgaggtttcaaatgctcatgccaggttcagtgtctctctttctgcctgctgcctccatatcagtttgtaaagctctcagtttctgttccattgtcatgcctgtttcctgccttgattatcacacactagcccttcaaaactgtaagaaagtctctggttaaatatattcttttatgagggtttccttgtctacttccaaaatgtaattgtggattaaacatcagatagacattctcattctagtgtggaaagagttaagaaaatacagattaattgttagtttaacacccaacaagaaaagcaatattaagacttaaaaatggagaacagttcccttaccctatgtctttcatcctagacatactgataggcttgggcttccaaagcattgggtaatccgactaccatagctttttgggctcaccccatgttttagctctctcatgttagaggattatatctgtcaatctcctagattggtattgtatactgtggttttgagggggtgggaggtactccatttccaagtttctattaaggcgttaccctattgggaactcttcatgacagctctacattatgagaggcttatgcctagacctccagaaagtcaaagacattctttggattctaggtagaggtagccgtgttccaacagcttatattctgtgagtctgaagattcaaaatttgtagataccaccaaaactttctgcccctgatctctagtggggtagctcaagatgccactgattctgcttgagctgcagttgaggggcccaagggaactgtactcagatacaaggaacagatcttaaagagttctggacagtaagctcatggagggtagccaaggtcatcacataagaattctgtacccctggagcttgggacctgtggagggatagactgttgggaagaactctgaaaggtctttagggacattctcctggttccttctatcttcgtggcaatccctttagtagctagacacttggtcacaacctcaatatactttcctaaaaaggttgttcactctgaacataaccagggtgtgaatttttctaaacccttttgccttgtttctattttaataatgaattctgtctttaatttcttttgaatgacatctaactatatgtagttaagagtagccacgaagcagcctgaacagccagattgtgtctaggcttagatagttcttctgttaaactttgtaatgcagtgctcttaaggtaacctactttccttcctttatttcctttcttcctcctcttctttctccttcttttgcctttttattccttttttgtcacaggatcccacagtgtagcatgggtgactttaaaggtgtggtctcctgagtgttgggaccacaggtctccttactttgttcttgagttcttcattctatgaaaccctaagaaatgagcatgattccaccacttttttgcaaatacataacaaagatggttcttgctctgattttcaatgccagtttgcatgtgagacctcagcatggtggctgtattcctaccagcctgtaggttattaccacttaagtaatccctaagaagactcctactcctcacacccctgttctgagctctcaccagaactatctagaatgttctatttatagcaactaaaccttttttttagcctttcccttctaaactgtctccatctctacccacttcctgggttaaaaatcacttctatgtgggtatgtttgctagagcagcagtcatactttttggtagcatattttgttcttagttcactttatgttactttaacaaaaccagaggcaaggtcattttgaaacaatatgagtttatttgattcctgatgctggaggctgaggagtacaagactaaaggactaaatttagacaggactgtcttcctatatcatataatgaagatagctcatggaaggaggctatgagagcaggaaatggtgggtcaggtaagaagagataaaatcagataaaactcattttttaaaatgtaatcctctggtaagaacattaatccatcatcaaaaacatagtctggtggcctaattacttcttagctattcctgcctcaatactactacagtcaacatgagtttgggaagggacatttaaacagtatcagtgaaacagaggggtaattataattacatgtattatgtaaagtaaaaccattcttgcaattattgtataattccatttaagtaaaatatccagaaagtaccaagtgaagagagatagttgtgatgtgcttatcatttcctgttgtattttcttctctatggctttgggttaagagcttgatggctttacctcgtagactacaggaaggcgtggagctgctgctttgcttaatgccaggtgcatttgttcaactctaaatccagattatggagatttaaaaaaaacattttttataaaatcattttatgtctgacaacacctgcaaagctgtttaagtgacatggaaatagccaccttttaaagaaatacttaccaagcagcaagtgggaaatgggagatggattctcaaaacagggtagagatgataaccactacacgtggactgtagagcagtcacagcctaggagatcacagcctacaagactacagtgatgggttctgccgaagctgggtcaagacaacagttatggcactctgtgtaaccacattccacagaagccaggcatgtttgaatcagcccactcccctttgagtaatactgctattcatttgggacactctccttgctccctgtacatgtgctaggtatctagctccagttgcccaactgtgccaagggagttcctcatcctcaagtctctttcactctcccccactctctgcattctctctgatgcttccctcaaaaatgttggttggtctcttctgattcttgtgtcatttttaacccaggttatggccttggctcttgagcttattaaatcagggtttgtttatattttagtttctaatgctctgatctctttgcatttattgatactgtcttcccaaacagtggtcatcaagctgctttggatcttacaggcacacatttcttcatgccccattagaaacagtgacatgatagaacaggtctgcaaaaaaggagagacatggtttgcaacatcagctggtatatttatctgcccattaccactgtcaagttcttaaataagacaggctgacatctgcttgtacaattgctgagaattcaattaataatgcatgcaagcaggtatatgtaggctccagaatttactagctggagaactgggtcgaatttaatgtcttctagtctttctaaatgatctgaatgtggccagtgagggaaattataaacatttgactttttagaatctaacacgaatagaaaacttgtcagtttagagtcacaggtaaccttgtgaaactctagtacattttgatttctgaagccacagtgaagggaatataatatataaacatatttgtaaccatgtatatgtaaaattagcagggatatttatgcctctaattctgttatgctttattaaattttatgtgttggatatagactctgtgtcactctctagcttaagctagaggcacgactgtgagggcatgcagccactctgtcaaagagtttatggtaaaacgtcatcagtggaggaaagccagtgggatacatagtcactggtggcagaatcctaagaaacacccactctagactgagagacttagtgctaggaaagtttccttgggacatagtcctaccagtcaaatacaaaaaaaggaagttagttggcttatggttccataggtgacagtccatcatgatacagtagacgtggagcaaagaatctccctttatggtcgacatgaagaagagaaaacaagacatggaaatgcagcaagccaaggtgtttcccccaggttagcttaacctcctacctcttaccatgtcccagtagtgctgtcactttttaaatccaggagagaattaatccattcattaagtcagagttgtcacgatctgtttgccctttggaatgtggtcacaggcaaacccagaggtgtgcttctttaatctaccagccagttctcaatccagtcaagtgacaatcaaaattcttatcacaatccccaggaagatgcctgtgttatgttggtaattcacaccctgcagggagatgcctgtgttatgttggtaattcacaccctgcagggagatgcctgcttcatgtcagtaatactccacttccttgactttagttgtcaggaaacttctttattggtcaaatatcttggtggttgtttgtggaggtgctagggactgaacccagggcctcacataagctcattcattgagttatatttcagccaccctatattaacaatatcgttttcttgattatgagaagtctttcttgagggtacaagtcaattcccatgaaatgtttgcccctgcttagacatgatctcacatgtggttatatgcacttcagctatgctgtttctagaatccaaagcaatacatgtgtaggacaatgaacagagactgttagtgagtctgctccaggtattgtatggtgggatgccatgctcagccttgatgcatggatgcatgggagagggttttggtcttaatgtgccagactttgttgactcttcatgggaacctttatacatggggaggagtggacatcaggggggagtggggtgggctgggggtagggggtagggagtgggagaactggggatggaatacagaatgaaacttaaataaatatttaatgccatatatataggtaatatatataggtatatatatatatatatatatatatatatatatatatatttcagttatgcttttcttttcacttcagtcttgaatggtgagataggtaggcatcgctagttttcagacagatattccttgagtggattagaagcatacatgcagagtgaaacaggtaatcctaggtaaaggtatcaaaatgaaggctggaataccaggctgttgtctttaacgtagctacactatggctcatgtaaggagttgatggttttctgcaaaaatgatttcaaagaacatcttataaatcatctatgttgacctttgacttgaagcaattcatctctatcattatttatcattatttatacatacttagttgagtttatttctgtcaatattaaacttgtgcagaggtttatttttatttatgttttgctgtggtaattatattttatcctcagtcaatatgaatgcagcatttcagttgtgttagaatttttttgcaaatatattatatcccaccatttatgaactctgtagagttacaatttaattacggtatttcactagtttgagaaatgtttattatggaatattcattctaattagttgaactgttgacagaacttaaaaacacatcccttttctagctttgagatttctttgtttgaattctataaaattttgagctgaagctcaatctcccatcatgaacctatttcttttcctaaatatgcatcattggctctcctggagtcccacctttgtgacactttcttcgtatgattcattgcatgacacgtttttcttcggttaattaggcatcaatgaaaatgatacctttcgccatatactgtggtttggatcaagctggtagaccttgaactccaggaggacagagatcttgtctgtggtgtccattcttttatttccactcacagcacactggccctttccaggagtgtttttctcaggtcacacaggaagctgcatgtctctgggccccacttttcatttagaaatgggcatgtgggtgacagttgggtggataggtctatttgtgtggtctctatcagtgggatcaggatctctccctggagcatgagctggctttttgcaactcattccctatggtgggatgccttgctcagccttgatgcaattcttgataaaccaggcttggttgttgccccatgggagaacttaccctttctgaggagtggatgggaggggataggaaggaggtgggggagaaagtgggaggagaggagtgaggggaaactgtggctggtatgtaaaataatttttgagaactattgtcctatgaagagtgaaacaaaatccttgacttggtacgcaagtgacagagcagagatttaaattcccctttatttccacccaaccatttgggttcttccctggtgagctatgtgtgagaaccagggtcatccacacacagctctggacagagatggaaaattagttccaaaagagaaaaacagtctatgaaatattctaaaactgtaaacgacacaggcagcatgaagccaccattcttcgaaactgtcgctcaataaacaagcttctgccattaagctatttgctctcagattcgctgtcatcaggatccctcttatttaggaaaaagattatctcaccttctgcttcctctcattttgcaattaatcctcctctgtcaccatttttttatttaaatgctattaacactgtactcaaataacaatgggacagagagaaaccttgtcacctttaggttactcttggaagggatgttaggaatgaacacacctaatccaaacctttaacagttgcggtaaggaaaatgatcaggacatggctttgagaattcagttctactgtgttatatagttcagcatgtttgctgttagcaagttggtgtctgaggggaaacagaaagtggtattgagtcacctttctttctgaccgtacatttcattataacatttatttcttttctccttgtcttctctctctctcaagtgcacactagcaaacatgagcaagtgcaagctgcctgcagggcttgcaacagtgatcgcttgctcagatgttgccaagcagacagccaaattcattctggggcttttctttttttaatatgtcaaaatgattttgcttcttagcagtagaaatgaacaagggtccgtaatacaattaaaggcattggttcagagccgagtgccatttttgccactgtttttaatcggttaaaatggataattaactcttagattaatccctgggaaattaaaggagcatctggtgaagtgttattctggggctttttataaaagtggttggctgttggttcttgttgggtcaggaaaaattttaagctctacctccattttcttccccctcttaaagtttgtcaaataatatgaattccacatagaagcattaccgtttcctctgtctgggctcaccgatgtgtgaagggtgtcgttgctgactagggatggaagcttcaagactattgcatttaaatgatccagtgatagcttttgagacatctatcagagtgatggtggaatgtgaaaaagttacacttccaaaatacccagaagagacaggacggcatctttactttgatatgacaatgctataggatacaattacaatggacccatttctgaaggctttaattggctttgggattccagaactggccagcctactgagcctacgtggttcatactgttcctctctactacatggatagggtccatttatagctagatcaaagattggaagcgaagcgaagcacacagactgtatctgggggtagtttgtgcctgtctttttcccacatggttggagcagttgatcacatgtgatttattgagactctgctccctgttccaagaatatattataagcatcctacacaccaagtgaagttatgggtaagcctttagcccaagcttaaaatatgtgcagagtcagctttaggcactacttaatttaacataagagtatatgtaaagtaattaaaatagtaataagagatacaggatgagctttgattatttaaaactcatctcttctgcccccatgcaacatacacccatttaaaataaaatttgatttatgtgtgtgctttatctttgtttcacttgtgtgtctggtgcccccagaggccagagggaatcagattcttggaagtggaactacagtcagttgtaagccaccttgtgtgtgctgggaatcaaacctgggtcttctggcagagcagtaagtattcttaactgctgagccatcactatctctccaaacccttatgttcatttcgtttacctgtttgagctttcccacgatgcaagactttctcagaatcacaaatagattctagtttacctgggacttcgttgagaatgcaactccacggtctccaccctataccttctatcttctgcaatggggcccagaaagtcattttaataaactctaaattgccctggggtgcactctggtttaagaaggcactgctctgtggtgtggatggaggtgagagattgtatctattctggttctttgccaatgattggcttataacaggcacttaacccagtttttgacataaccctaagggatttcttctgcaagggtactgagaaaagctcttttgctatttaaaggatggaaaaagcaaaatgtagtagtaaaatggggattctaggaattaagattcctgcaggaacatgtatccttggagtggaatgccttaccccaggctgcctggcccctggagaagcattgatctttccagggcacagattcactcagtgctaattactttcttttgtgaactctagcccttggataggcaaggtggatgcaatttaaatgtgtccagtttgctaaagttgtaaattaattcattttcctttttctttagatctatgacttttgtaatttaaatacattgtaaataaaggcaagcattaagaatcagagcctaacttaatatctgagatttccagtagattcccttattgccattggacataggtacattaagaaaatgctgctgggtcccacatgactaaattgtgacaaggaatgccacatcatcatgacaaaagttacatttttaaaaaaaatgtgagaccagtaagatagtttagactatgaaggctcttggatgtcctgagttccatctctggaacccatgtggggaaaggaaagaactgactcctgaaagttgttctctggctctacaggtatgccatggcaccctcatttacacaggcctgtaatacttgaacatggacaggtacacacacacacacacacacacacacacacacacacacacacacacacacacacacacacacacactttaaagagtgttttaattgaatctgaagtcactctacctcaatacaccctatccagagaacatttaaaaacaaacctaaaagctcttgactgcttataaaacattgagaaatgtttgctttatttctaaggtttaaagtcccaaagtagtaacttggtcatgcaaggcctttcaagtaaatcctatggggcatgcagcatttaccatggagactgatcacaagaaatgtgttgctcattcttagactttatgtttttcagaacccttttgaaaaaagggtccagctgttgaaaaattctctacaaataatcatcctctccatgctgctgattgtcatgagatagtatctctctttctgttaatgtgtatgtaaaagaatatcaatataactatgtggttatttaattgatatttactttgccatcttaagcctataggtataggaaaagcagatctgcagttactgcctcttatgtgaaatccctgccttccccaaacagtggcttttatttcttgttattctgcgtgtccattgtttctgaaacaatgtcttatgaatgggctagaaatatttcagaacagtataaagcatttgtacattcacacatatattccataagttacattttctgacattacaaatgacttctagattttaaataatgcattcctttacatttgccactcacattattttagtatgcatttcaaaattcatttctgttactttttgcttaaacttaatcatttttatgtatttatcaactatgttaaattgcttgcagagaaaaagctatggaactatgaattttaaacccatatatgtgtacatatttttatatagtaatatttgtgatctatattctttaacatttttctcctatttcaatttttactggtgacaatgttaactggattagtaattcatttctagattaaaagtttcctgatgactgacacatgatttttgactggtacagggttatatttttttaaattatgacatgtaaacttaattttttaaaatatatctatcctctagaatacatattgaaattattcttgatttgtcagagttatattcattctccatgacttgagcataatatcttctcaggaaaagttcatctaatggtagcaggtagagtttgatgctttttcttctgggaagaatgaaagccaaaccattactttggctccgaaatgaaatttgaatttttatgtgtgtatctcttctataccataaaatgataaacttctccattatgtgtatcacattcaccaagtgactactgtaccttcttacttatcggtgctctgaaaatactccccatagagacaggaggagggtgtgacgagaggaagaatgaagatggagacggaagaaaggaagtgtctaggatgatgaaagagtagtaatagagagaagaagaaagggagagaggaaagatggaaggaagtgaacagagcaatagaatatattgaatttgatcatatgcttggactctgcaagccttgtttctaagttaggaaatgttgtcactcagaccttaaaaaaatcaaatcaactttggggtgctaaataaagagtgtataatttggaaagaataattatagctagctagcactgatgtagtgtttctctctacctggacctttcccaagctctctattgggtacatggggggctgggagtaggagggtgtaaactcatttaatccttttaacaaccctggtaggtggatactattatttgtcatttcttttatagatgctaagatttggggaattaaaatgctgaatatctttcaagaggtcagttagaggagcatatctgccatgttgaccttaggtagaaaaccttttagtgaaggctgttagggatctaacccatgggtgaacacacatgagaacatgtcaaattagcttttgaagttcaagagtttgaaatttgaaattgttttatggaacaacatagtgtgtacattacatactctagactggtgttacccaactgcccagtgctttgtcagcagccttgtgggtatagacattccatctctctttgctacagagacccctttcctagagaaattatgtagattaatgtttgtaagcatctaaagttcctaagagaggaaaaatctgtgaagtagaagagatggtggagggcaggggaaaatgctgaataggtgacataaaaactaacaagcacacgattgttcaaaatttcactcttttctcttttttttttttttttaacttaccagcaatggaaagaggcaacaagtggttaaattccttgggcatgattccaccaaatagtctcgcaaagatggaaactccatctgcccagcaaaaaattgtccaaggatgtgttgttgattgtaagaaaacagtgctggaacggaatataattaggttttgcaaaaggatgtacagttacaatatggaaaacctgatgtaattcttgcctaaaccttagagttataagttggtcctgactaggaagttagagagtatactgtcctataaccttccaaatgacatcccagcctagagtaccacactgaaaaaccaagccttgtcgttttgcattttgtttatggctgcattcattataggaggtttcttcaaagaaataccattttcactccatagtggagaggcattatagagcaagggacaaggcaccagtgtgtcatcttcaaggcacagccctagtggccaaccagttaaaacctcgcctcccacacatgctgccatctgttcccaaacagtaccaccaactgggaaccagggatttaactcatgagccagtgaaagacatttcctatttgggtcacagtatcttcattttttcatggatttatcttacccaaagagatacaaggaaaacaagctcatgatatcagacgtttggaaatggaaaactggatgaatgagtgagcctgttacctcaagaaaagctacaaacagttgcccgtaacagttttgagagaggaggagagagagagagagagagagagagagagagagagagagagagagagagagagagagagagagatcttttgaaaccttgacaatgtcatgctgaggctggcagtgtcccaagagtgaaagatgttcctcatgacgtcagtggcattattgacagatgtggcttttaatactgtgtgtaatgaaacatgtcagcatttgcagcatccaagtaactcaggcaatcaatgttttccaaatgacccatgagggcatgctattcctggggaaaaggatccattcaacatgaaaatagcctggcgggttttaggagtgtgaacttcaccagtgaaggcttcagactctacagcttaacacatcattttgaaacttctccttgtggtgttttggtatggtggcaaacaggagtatctgagataggccaggaagatgaggaatgtatgtctcctttgaaaattctttgcgtctaagactagaagacaatgcattgtggttgactgaatgcagaagggaatatataaatctagcatcttctgtcaagtaaaagatttgcaaaaaatgttctcttcaggtgaaagagttatttttgataaacatttatattttacattagtcatttctaatttcaaaaattatatattattgtgctcttggaccttgagacaagatcttgttatagatttcaggctggccttgaactggaagtcttcttgacttcccagtgcttagtctataagtgtttgcccccatacctgcatacttggttggataactctaaagaataagtgctacttgcatgtatttacatgtttattcccccacagaatgtatcaataaagtaatttttagagcgtaccagctgaattgtgccccattagtggcttgtgacagtgactaagacattagtagctagtacttttattcaatgtattatgataggatggaaagcaccatgtttagcctcagatgttacaggagatcttattgtaaaaatcctatttcagttagatgtatttgtgcagagagacaggtagatgtactggagcaggatgaaaatgatttatacgtcttactgtaggtttccttgaacagttcaaaagccttgtaggagagaacagtgcttgcactgactgtgtcctggattctgacctcctgtctcttcattcacagtggaatggctcttcttcccaaagcctttctttgatttcttacacaagggcttcttcatcaatcctggcttctccacactgaatgtaggttaatctaacttggatcaccttccagctcttctctttcctctttgtcagcccctgttccatttccatctgtctgtatatcatggttttttctctttatcagacacacctctcttcaggagcaatgtgttctgggccaatgcattgttttgattatgtcccttccttcagtggatataatttatagtctgtgatctgaaagaccccttcagaactcatatctaggaactcatatcttgcttctttcctgtcatcaactgaagaccaccctaggctaccttgtagattttagggaaatactggctcttttagtgagacattcataaccattactataaccacaactgccctgtggactaaatgtctaggtcttatatagtgcaaaaaagcctctggaactacacccaattttgtaaattaaaatattaacaaaacaaattgtttgagaatttcaaacaactaataaaaatgataaaaagctctaactctgtgtagcaattcctagggactatgtaattcccagataggacatgagaacaaaccgtactttagggaatcatttcaaagtcttggttgaaatgcaaagggctcttatcacttgagtaaagactgtgtttaagaatactgagatttgatctcaagaattaaatggcactattcttctctagtatatatgttttgaaatatcatcctttgtagccacgctctgcacatatagctttcagcttactgcagcattctcttctcatgagctgctgagcgtcgagtgaattacatcaatgttcagaaccctagatctgtcacatctgaggaattagatacattttctgtatgatgctcttgttggcaacaaatttagagctacagaaaagtagacgacaagttttcctttattcacatgcaaagtattacttattgctttattttctcttttccaaagtttagagtctttgagaaaagacaaacaaaccaaccaactaaccagaaagaccttcaacactcaagcatgctgccaaaattcccactgcatgaggagagagaccaataggctagcagccatttatggaaaagtcactatttatttttgtggataatatttttgtagaaggacgtcacaagaagacccaatttgttatgacaattttcatgcatatttatcatcccctgccataaaactttggaaaattataaacaatacaaatacttggcttcatatgacattctgacctttaaccttatagacgtcctagaaagaacatatttattgttttccatcctagtgaatgttaacatcaattagacaattttaagggtcacccttaagacagcagagtaaaattggtcatggtggtacacatctggggaaccgaggcagaaggatggcaagctctgggcaatacaataccatgtcttatgaaagcaaaatacacaacatcaacaacaaaaaaagaggccccagtcaccgtgatgaaggggactcagcagtatacctctgttcaagtcccctcatctctctaaaatcggttcttacccctatctaactgcctcgtcctgcagctgtctgctttgggccatttcccctaaggaagatgaatcttaccatatgttcagtgtctgaaacctctaccttttttattcctttgttgataggagcaagtttgatgccctgcccccaaggacttttgtcaatggaggaattcaataattcaatggcaggaaaatcttgatggctatccaggccaacaggtctcagaagattaccacgaaagtaactaggagaggcactcaggaccaagtgtgcctgctacggcactactctgagcatccagagcagggagaagcagccacagtctgagaggcagaagaatgagaccagtttctggagaggcccagactggatgaggaccataaggtgaaggttcttggattaagggcttgtgcctctctcgtgcttacacaagaattttctagagtggagtttccctccttccccttgtcaccagcataaactttacagcttgcacaaatgttacttcttcaaagaaaaagctgaatagagtccctaccccaacaaataccacaatgaaaactcttacaccctaaaaagggaactgattcaaaacaaatgcccaggcctgccaagaaagacagtagtagccagacccaagccattcccacattgtactgcctgctaatacagtggggtgggaggcaatcagtagctttcaggttccagaagggtaagtgtaggggaagctgtagccacgcctacttaggggctggctacaggtgtgcctgaccacacttgtgagggcatggtcagagtgacatagtgtgactgcatttgctctttcggtttcactttgctgcttgctgtacagactgctgccacactggctggctaagtcgctctgtaagtaaggcttttccctattaaatacccttatatttttacctgactccgtattggtattttcccactatatctggtgtcagaagtgtatatttgaaccagtgaactcactgcagcaagaggagaaatgcctcctgggagacaggtacctgaatctagtcccgccaatatattgcccagtatcgctgagagtgaggtcgatttggtttaatatggtccttcagaattcctgaagcctgaaagtttaaagcaacagacttttctagatatccagaggaaacaattttcatatacaggaacaatgtatttctggtcagttgttcaactagttgcaaagtcactgattagactgcaacctgttacgcacaaaattcacaactggaaggtgacactgcttctataaaaaaacatcacttctcaggaatgcatattacacatatctggttgtgtaaatgtgtgactagtagaagttgacccatatgagaaaagtaatctgtatttggcatttgctgtagtgagggagccgctcaccactgatgtgtttggcagagactcaaaagcaggaaggaaagtaggaaaacatcaaagaagatggagagagggagggaaggagggatgagatgagggcgagatccaggtgtgctctgtcctgactggagagtgttgacatggtgaaacatctcttgtagttcattagttggaaacaggaacagaacccagggaagtcagaagtcactgcccagatcttgaccctctggtctccttttctggagatcttatgatgtgtcttttgggatgattgtaggtattgtgagtcagtgttttgtggcccttcccttgattctgtggatttactcagagcatcaggatgaaaaaacaaatatttattatctagaagcttctaatgaattatgacagaaggaaacacacacacacacacacacacacacacacacacacacacacaccacacacaatgtgattcaggatagatcatcgagagagcataagaaagtcagagcagcccctcagaacaactcgagttctgagtggtgaactcttaaaaattgggtcctgaaagcactgcatggggtggggtgtgactcttttagtacacactctaccaaggaagcagaatcctcaatgtgtagaaggaggaggaggaggaggagaaggaggaggaggaggaggaagaggaggaggaggaggagaaggagaagaagaagaagaagaagaagaagaagaagaagaagaagaagaagaagaagaagaagaagaagaagaatagccaagaggttcaattactgtgctaaagccacacagtaaagggcggcttggtatcagctgcaggttgcaggatgtgaggagggcagtaagagaagggcattgtcctccacttcagatgcgctagggtaaccaagtgtttagagagcaggtgcgaatttaaaagcacattcagttctttcattcttgaaggcaataaataaataaataaataaaccacaccaaccaaacaaaaaaattcactaccccgttgtagctatatcaaatgctgtacttgtcagttagagatacagaaattgttatcacagtggaaagcatgtccagccatccaggagactcatatcaaaaagggaaatagtctaaataatccagcctccctgccttgactttctgatatccatatttctaccgataaggccatagtcacagctgcccaggaacacttgtgtttcttgtgactcactgagagcatcacacagccagcaccaggcactcttaatctcggtggcactcaaggagataaacaaaatttggggacataaaggagctggttattggttgaaaagctgtgttagcctgtgaaatttggacctactttattgtggagcttagtttagatctgccccgaatgtctctcgtgagagtagggccaaatgcatggttcaagggagtattgagcagaaaactttctttcacgggtgggccagcaagaaggaggggttttccccaagcctcctttccatctttctagctataaaaaatagtgaatcagaaaagtcagctgaaatttcctctgctttcaaggctactgttcagtgggcttgaacaatcaatactgctgtccagatgcttctgaagaaaaaaaaatccactttaactctgaatctccttgaattggcaggtctagcgagagacaatggtcattaaagtgaaaaggccactttgcttatctaagggtttactcaccaatctctaaaggattctaggaattggaaccttcaaaatcgatgtgtgaaataagtaagtcagaagtttgcccagaggaaaaagccatcaacagaaacccgttcaaatgttggaaaagcatggcatctaagacagggtatcaaatcaccatgtgcaggcagccatgtgtcactggatggtagaaacgtgtcctaagcatcatgtcttatggcatttcaccatgggagaagtcagatggcacagtcctccacgcacctctgctatgcacaggccatgcctgctgctgctagatccagggtacacaaaagtatatgaggttaagggtacaagatcactgtgtgcagatcagaaaataaatgatacaattaaaagacaggggacggcatggcctgtttgaggcatgagattacacatgactttgcagtgaacgtttcctttttttagtagagggtatgcacttaaaatttttttttgagaatataatatagttacatcatttcttttacacctctcctccctccaaaccctcccatattctgctctaatgataaaagtatagtatattagacatatagccagtaaccatttattactgttttcaaagattctggaggctataattgtgctgtatactttatggagttggaagctcactagttttgttcacaccaatgtcaacatgaacaagaattgtgtacaagaatgccctgtgctgcctgtgaatggccttgtggaatgatggctatggcatcagcaggtgacaggagagcattgtcatgtgtccagtccgttattactcagtatgttcttatgtggctcatggcaatattaatatgttagtgtacacaccaggaaggaacattgtccatgggcatgcttacgttttgtcctttctgagtgcctcccttacgttcaggttgtaatgtcctcctcccatttgtcttttgaaaatgaaaataagctgggtgtgtggtgcctatctataattcaagagttcaagagtccagaagactgcaagttcatagcagtctaagccacatagcaagacatcagttaaaacaatcaaggaagggttcttgtgtagcaagatccaaggtcacacatcttatctcccacactatgataaaaataacaataatagtgattgcaataaagaaaagaaagaattagagccagattattaattattagactaagctgtctgggcccaggctgggcaccacttaaatatgtgggggcagtgatggtaaagtcacccatatactaaatattatctcatgcttgtctctcagccacattttataaccaaacaatcataaaagcaagttgcttcagtaaaacttctctctcatgatcctgtgtttaactctctgctctttgttctgttgagacaaggtctcactgtgtaaacagactggaaccagccctccttcctcagcctctccagtgccaggattaaaaacctgtgcgtctgtgctcagcatccattccctctgtttctcagtgtcatgtggaggagagcctccatctccacatacttccttccatgctgtactgccccaggttgcggtttagcaagcaccaactgaactctctgaaacagagacagcacatatacctctccctgaagtttgatatgtcagttatttgtcacagggacgagaggttttctgaacactatgtccttgtctcacattgacggcatagattgcttctgataaattatagaagtccctatcctaagagctcaaagtatttctcaggtagtgctgactcttttagaagtagataagaaagtctttagcttgtagtagaagaattttttaaaactcaatgttcctaaaaagcttgtgtacccatgaaacgatgccaaatcacctattgaaagggttgtttttagctgaggaaaaggggacacggggtaaagtctcaggacaactgacatatctctcccccctcaccctttcatcctcccccaagagattgaatcctgagccttgtaagtccctaggaatcggtttgcacctttactggtgtttctagaatctcagatttgacccagggctttaaaaggtgtctgggtcacaaaacaacaatgacacaactttgtttttaaccactggtcactaatttgtacttctcagctctcgggatagttcaggccctttattccatagtatatgcttttacccatgccatggttttcagtgtggggctgagctggaagtgagcagtcacattgctatcccagagaagtgaagcaatgttggaattgggggaatacttattgcacaggcatcccaaatggctttttgcttcccagtagacagaaatgaaccaggtttattcacagggatatgactaggtgcacagtcactaataatttacattcagagtgaattactcaaggagcaaggaatcataaatggcctcagcaatatttgcaaacacttatgaacagcaaattcatgaatggctgtaaggagaaactaggatttaaagaactgaatcataaaaccaatccctacatccaaagctgccataaatgtgggggtgtgaactgtgagtgtccccactttccctggtaatgttctaaatggaatgctaagccaggtgcccttgatatcttttattagccgtttctgccaaaatctaagggtgggttctatatttccttccagccaaaccaatgactttttaaattttttttgtgaatagtaatatttttaggggatgactagtctatatttgctaaactctgttggatggatgggtttgagggtaaggaaaaggactcctcagaaatgaaacatttacattaataaaaaaatagagttcacaagggaggccctcaagtgtcaggggctctgctctgttctccccagagaaagatgacttgataagactattgatttcatcttgttgggttagaagagatgtaagcaagagaaaaggagactgccaatggcatttcccattctcttggtgtgtctacactgcattaaagaaaaaacaaaaacaaaaacaaaaacgactcctcatcttagagtagtttaaaccaagagcaagcccacattttaattcccaacttctctccctgtgtcttctctctgtccgtgctctctgtctctaggacagggctgtgctctgtatttattgagcatcacagaaaatgtggtgtgggaaagaaatgatgaatctgtcatcttaattattctttatggtagtatacaaatgaaaaaaattagtgagctgcactgacccagaactcaatacagatatccacctatatctacgtgtttatcccaacatttactgtggatactcattttcttcacagttgatttcaacctatcgggtgctttcaacaatgactactgtagcgagcacgtgcacgcatgcacgcacgcgcgcgcgcgcacacacacacacacacacacacacacacacacacacacacacgcatacatacacatcaacacgcatatacaccacacacatacacctctccctctctctctccctctctctctctctctccctctctctctcctcctccctccctccctcctccctccctccctcttctctctctctctcttctctctctctctctctctctctctctctctctctctcttcgtgtcagggcatgtaacaatatgtactttgagatgaaagctctgtccttagcttaggttgcaaaaactgactagagggacagtccaaggcatagtaagtttggttacaatgtcgtctcaaaggcaggctgaacttatacagcccaagagcacagtagggaaacagccagtacatagttttaaatggcttcaaaaatattattgatttgattgtcccacagcctggcaaatgttcagtatccaatggttagtgatattttcaggaaaagcttttcccacacctagaattttaaaatattttttaatgtgatttctgagtccatcaattgagctataaatgttcctggctggccacagtgtttaccaggagtataataggaagttaagggtatttaacttcaaaagagatgtttgaatatcagaattaagttcagcattttaatactattaaaattgaaagtctttagtaatgaaataggaaacattactaattatgcaggtaacatcttgcatactcatggtaagacaaagtaaaagctgggattggtagtgtatatctgtaatcccagcacttgagaagtggagatggcaggactgtattttcaaggccaagctgtgctacattgaaacaccagtcttcaaagaaagtaaacgaatgaccaagcaaaagaccaaatacaccccataaaataacccaacaccaaacaaaaagacagatgggagaaaacaaatgaaagctacaaacaggatggaggcttgtaagatgaaagacagacaccttccataattatgttctctgcctcagaaagaaaaaggttacagaaatccaggcattgaacataagacgaacactacatatgtctcaggaaaagaagacagcatttgctatcagagaaagaatgagaaagacttagtaagacattaaaatttgacgggacccagatgggatttccacaggcacagatgggaacaagagagaccctgcagagagcacaggtataagatgaggcctgagccattggcaagtgtgtgagctgcctgaggtatatacaggctgaagtacaaaggtggaagtgtagtatggcagttttgggttatactatggagaattctgagcagcttcttaaatagcagagtacaatggggttgtgtgttctctaaaaggttatttgtgtgtgtgtgtgtgtgtgtgtgtgtgtgtgtgtgtgtgtgtgtgtaggtatgtattcacatgctcatatgtgtagaggtatagattcatgagttttgcatatgcatgttgatgttagagttcaattttgattgtcattcctcaggagctgcccacctcatttatttgagacagggtcactcacttcatggggacccttcacttgccaggcagtcatcagcccatgaagctttctgtttctgtctccccagcactgggatagcaagcactgcaacccagaactcaggttttcatatttacacagaaaacaacactttactgactaccttcccagcaattgcaatggaagttgtttattcattcatttttaattatttgtctctgtatgttagcatgtgcatagcacacaagggtgactgcaaatgcccttggaggacagaagaaggtactagatgccctagaactggagttacaggtggttgttctaggacatgcatgctgggaacagactgctggtcctctgcaagagtgcagtccttcttaccactgagccatctcttcagatcttccatgaaagtcttaaataagcaataaaatatcaggcttatttcttatttaattcccggatttgtcaattaaatagatcactgtgggtacaaattggttaaagaccccatttaagagacaacttcaaacaagctatctgacaacagagctgatggcatcaacaatgttgggatcaacttgagaatattcagcagcttatatttgatcataatattaggcaatggcccattctataaactgggatgaggggagcacaggaggggaggctaccttttacaagcaggaaagagctgacaaaagcagaaaatgaacaaaaacagaaccatcatttcaaagttaattttctaaaggcaaaagcagaggggtcttcacaaacaactggtctacttagagacttgtcgactctctccatctctgtgtcttggtgcccagcaaagtcacatgaccatagagcaggctcagtgctgtgtaactgcagtgtgtggttccagtttgccatggtctcttggagctggtgcaaaggactatcagagctctctctccactttcacagtggaaaggcaggagtgcccttaggtcacctttcatagggatttaaaatccatcagttttcccaggagacttactctatctccatcttgaagacagagaggggacttatatacaaacacttctgtattctgagtcttcgtccatcctctcttgatcctctgttaagcatcccttccaattccaccccttcagcgttatatgtcaaaatgtttgcctggaatgaaggagaaaaacaaagctctgggacctggaacagcagcatctagctcaaggggtgtgggtgaccccattcttgactctgagcattgggaaccaagaagatgatgagcaagagagaccatcccaagagtaagccacagtctgaaattagtttgagctctgtagaagaatgaaaattgcaattctttgcttaaatgatagttcaatatgtaaaagggttgttccagcctagatgaattggcaagcccaaggtctaatgagagtcttgccctctaaaatatagtaaatgactcatgatgaacacttaagaatgacttctagcctctgtatgcacacacatacatgtgtgtcccctgaaatcatgcacccacacttgtgaacatgcatcatcactcctaatttaagcaaaaccgaagcaaatcatttttcattcatgccaattttaattggacttttgattgggtcttatagtacaggccttaattgcaccttgggaggctgaggcaggaggattcgaggccagcttgggtaacagtaagatactgtctccaaattaaaaaaaattaaaatgggaggtcagtcacagtacttcctcacaagtgtaaagccctaaaatgagttaattaatctgtatgttgaaataataaatgataaattgatattttcccagttactacccaagtaattccaacaaatataatgaacattgtttaaaatatttccaattttattcgagtagaaactgcattacttgagatcgatcaaagaagtgcttttgtttttgaaagaaataaaattacatatattacaaaaactttctgagaaaatcataacagggacactttttaacctttaaaattattgttattgtttttgaaaaaatttgtctaatgaatgatctaggctatatttccataagtagatcagattggcttatactcagttgttattaataatgaaacagcagcttctatacatgaaatgagctgcaatgtggggtaaaatcatcaattacaaacagccttaattgaattattactagcaaaacaaaacccagcttgtgctacaaattttaatctcattattattaactctcattagaaattcactctgctttctcttcttagcgctgctcagcaccacttttcctttggaaaagctttctagaagaaaaagaattacacaggcagacttaaattgtggcatacctgcctccacctaattgcctaaggaatccaagcagcactttagtgatcatttctcccatttccacatctagcacttaaaacgacagtgcacatgataaattgaaaatatgcgcacataagaaaaacccatgccagatgctcagtgaggctcctctcattaagtctccaaatgtctctgcttaatggtgggttacaatacgaagttggaaaacttcccttgaaatcttgatcgattcatttctctctcagaaccatagcagtataacaggtttcggctttcctttggtgccttgctggcagttgggagtgtctcagagagggattggggctaatgaagtcaatggtaatgatattctacaaaactttctggtaaacacaacgatgtggttaatttatttgagctgcctttgttgttgagaaaaaaactggagagttaggaaggcttccctccaaaatgtggggacctgtctggggcctctctcaatactttgaagttcttctgcatactgtgcttttccttcaatgcccccaagtgtgtgggctgtgactgtttagcttgattggtgtgtgaatgtcatcccaagcactgagctgctgcttaagaaggaaccgtaattatggattcccatgaaatgagcctgtgttcagcagaacctttctctggagaccttatatatggttgtgaacaggggtcatgtcgacaagcagacagccccagccaccagtttaatgtgacacattcatggaagaaattccttgaataaatgagtcaagagacctctgcattcagtgttaactgaaagagacagatgtccaagagggagattcctgaagaaaatcagagagcagccattttcggccatgaagaatggatgcagccttgtttcttccaactatgcatttttcatagttcacgtggttcttgcttaggtttacaaatatcctttctgccattttccccatctttgaggaaccaacacaagcaccaactatatgaaatctaagttaaaactgacccgtagactttttcctttggcattaactcccccaaaacagtagagtaactacacgcagcactctcactgtgtaacctgaagattacacaatgtacacagaattgtgggtcaaggatatgtacaaagatgactttgttttgtaagaggaatttcagtgtgtttgacaagtactagaacccatttcttaaaaactgtgtgtgtgtatgtttgtgtgtagacacatatgcacacacatacacacaccacatgcacacaacatgcacatgtatcttaggtcttctcatggaactcttaaagtatgtggaatttttttcttttcttttttgttttgaaccaaattgtcttagagacttttagtacttgttagaataaattttgcaatttcttagttatgctgctctctggtttcctctactaatgggtttgtctgtgtttaacattcattttctcacctaattgctatttccaatgtttctaaggaagttaattaaccttatgctaaagactgacatcaaattatcatcctgagatagaagttggaggatgggtttgtgtgtttgtttgttttcctggcacagggtttctctgtgtgcttgctttgtcctggctatcttagaacttgctttgtagactagactggactcagcctcacagagatctgcctgcctctgcctcctgagtgctgggattaaagtcacaaaccacctggctggaggataggtttttacaggaggtttttggagctcactttaggattaggaactgggttattgtcttttctttgcattagatttgttactcttttatttatttgttagtttatactcatgtagtctgaagagatttttattatggataaatcatatctaaatgaacattcaaacagctaaacacctttacatatttgtattcccagttgagagcacaaattctagtttgcacattatagttaaaattttcccattttgggcgttggtggcgcacgcctttaatcccagcccttgggaggcagaggcaggcggatctctgtgagtttgaggccagcctggtctccagagcgagtgccaggataggctccaaagctacatagagaaatgctgtcttgaaaaaccaaaaaaaaattcccattataaaaattatggttcagatctgagcattcaggaggtggaagcagaaggctctcaaattgggctacatagcaagagcccagatcaagaaagaaatgatggttcaagaaaaaagaaagattgtgagatgcaacaacaccagtcactttaaattctcatcctactatccttgctctaggtacccttcagcacagaggtgatttcatgggaaaaatccttctgctcattgctctgtatcagccttcatcagtgccaccctcctgggtgagaacagaggaggcagagggggctctgtggctgtctaatcggccagttaagcctttaagcagataatacaggagcttacaggctgatatgaggcaggcgaagcagcttattcttcatttctgaacattgtgtcaggtgaatcaagggcaaacagtaactaaataaaaagccagaatatctattttctgtttctatacttggatatctttattactgaagtagagtacttgattactggcagggattttggaggcctgatgatcaaaatatcttccatttctgtttggattgagcacatcaatcaaacagaaagggacagacaaaagagaataacctaattccacttagttttgcactgtgtgtcacagttctgaagctcacttccctgaccacatttaataactcattgaagccacctctctggagcaggccttggcagacacttccagccatgagaggagcatgggccaaatgctgctccacattctgtacacactacttgctggctgatgtgtccatgagcctggctctcctagagttagtgctgggatgtttgcagacagtaggacacagctaatgatgtctgcacatgctgagaagcctgaggcgggagaagagacattcctaaatctcagggtatagaacgtgtccaatgttggctgtcttcttggtctgtcaggttgtatcattgaaattcattttatcccaccttagtccccaccccaggcccacagacaacattataaaggactgattataagcattggtattaatgttttatgaaagagcagagtaagacttagtgaaattatttaacttgatcaaagtacagtcattgtaagagttgagactcaaatctagacccatcttacatgaaaactccttcccacccaggtattttgaatgttaaggaatctaatgacattcatccaagcaaattagatttttttttttttagttgaaaatcactctgaaactgtgtggtgggaattaggtgactcattgatataaagtatagagtatggttttttaaaaagctttttttttgctttgaaataattttagacctacagaaaagatgcaaaaataacacagagatttcccatcgggccattgcttggcttcctttcctgttagcatcttacataagcgtggcataattgttgaggtgggagattggtgctggtatggagctaaataaactacaaactttactcaatatcatctaagtgttcactgctggctatgagtttttgggttttgttttgtttaggggtgggaatgctattttatggatttttatagctcagtgccggatggggattctgattgaggggtggtgatcactgactgcagaatggataaatgaatgaatgggttttaagtcacacactacagcttggggatccttgtgtggagttatgtcacacaggtgtgaagcatatgaagagacgccgaggctttgattgaatgttttctatagaactaaattccaccttagactcggtgatgaaaagggttttattattcttctctcaattgttacatcctgactgcagtatattgcatccattacccttttcctttcctcctagtcccccccccactgcatctcccttctctctccatccactcctcccccatttcccttcagaaaagagcaggccttccagtgatattaaccaaacatagcataacaataagaataagcacgttccctcatattaatactggtgaagcaacatagtaggagggaaagggtcctaagaccatgtaaaagagtcagtgacagcccctactcccatggccaggattccctcaagaacacccagctatacaaccataacatatatgcaaaggacctagttcagacccatacagggtctgattgttggttcagtctgtgagcttgtatgagccctggctagttgactctatgggctggccatgtcttgtgctgtcctcaactcttctgactcccacaatgcctcctcaccctgacttgttgatgatcaaacttgtagaataatgaaaatacttcaacataaaggaggtgaacaaacaagataaaagaaagacatcagagcaatctgtcaactggacagaaggctctggtggaaggttcagctctctctctctgtctctgtctctgtctctgtctctgtctctctctctctctctctctctctctctctctctctctctctctctctctctctctctcctccctgcctccttccatcgcctcgccccctctctcttgtgtgtgtttctttgtgtttcttctcacactaatgagtgaaggagccagtggttttcagtctgtcctgtatttgcaggcagactgaactcaattgttaacccaaactgtagctgctccctggttaagggaaactccatgcagatcgttcccaggcttccacttgcttttggactggttaagtggagttgatgtgaatctgacgacagtgctttctgatgcaaacactgttcgttgccactttttaagccaagagtatatataacctgcaatattaaagcacaaaattcttgtcactagtttaatgctccccaaatagcctgtttccccacttgctagcatttttcacctcttgctgatcaagctttaaaaatattaatgcaacaagttatagaaagataagaacatagaattattcttcattaggcaagctagtgttcaaaaattatgaaacagcaatttcctcaaaaagttcaactttctaaacattttctttgttttatcacctagatggaagatgtcatagcacgcatgcaagatgaaaaaaatggaattcccatccgtaccgtcaaaagcttcctttccaagatacctagcgtcttctctggtaagtgtgcatctagcacagctttgttttcttcagcgcatatcacgtcactgttttgtaaacctctggtgtgttactagacagcaactagtaagacgccatagtaccttcatcatgatgtttagatcctgggaatgggtgtaagacaccctggaaacgagtaagatatgacgtaaaccaagagttctagcctgacacagagtcacttggaaagagagaatgaacacatatttaataagaaaaagaaaaaggtgaagataaatagcaatgtgtgaaacgatgctatggagactaaatgtgaaagttgagagaatgaaagacaattaaggaaaagtcaggggaggagtcttgaagcatggccctgctcataactggaaaagtcaggaaggattacatcaccatctgccgtgctgagaacagggcaatgacagaaagcatggggaaccagccattaatggtggtgactaatttgtatctctaaaagacaatcacaggactgaaattccaacaaataggggtggtagagagcttttaaataattataaagaattctgtgatgagaggtttggggagttgctcctgtctgtacaggcccaatcacacaaactaaattgggctctgcataaccgaggtcaaaagattggcatgtggggtaagcctgaaacaccatccttgttgcagggtttggagtcaggggaatgaagtagagacaggaaaatccctgggccacattttctaaccagtctgatctaacgatgagcttgactttcagtaaaagattctgttaaagatggggaacagtgaaagacatgtgatattaacttggggactccataagtgcaccttcatgcatcctgcagctgtatgtgcatgtgtgtgtatgcacacagagacacacacagacagacagacatgcacgcacacactcacagagacagactgacaaagagaaatgaatgttttaatacacaggcatgactcttgtaggaattgattgcatagcaagactttaacacccagggattgaagaacaaggaaatgcaagggttttgtaactgggcatgcaggataaaagagaatacagaccatttttgttctcttctttgctactgagaagtagagaatcctcatcagaaatacgagactatgaaaatcattagcaacagtgtaaaacccaaaagaatgggcaataatcagtgaaaaatgtgtgctctgactccatgaagctctgactgaccctgctgtggagtctgagtggcgatggccataactgctgaagaatcagttgacgcttgatcccccaaagcccgagaggtagccatgatggacagaggagatttcaggagacagagattcaggcatgagtgggggttgcatggcaggatcctgtgaacaaaatgagcagtccattctggagcagggtcaagggaaggctgtgatcaggaagtttcaaccctggacaggacaagactggacactggaggggcagacaagcagacccgtgtaccggggtgtgatagctctgttaaacttcaatcttctgagaattcccagagagtgacatgtccctagtaacccagggcatcccttccttttcatgtccacctcaatccagtgtcttgacttgcagtctagacctggaatttgatgccatctccattatccactaccagccgacttcagaacattctatttattgaaatgtatcttctcaatagtcagttcagagaactcttcatgaaaactagcctaagctgttttctctcccttattccctaccccttctttattctttatcccatccattcttcctcccttactcccaaaatctcatataaaaacaaaactgtaatgagtgtttgtggaaagttgaacttttctagaaaattttgctttcataattttgtaaactaattttgctcaactcatgactcacggtagtcctaaaccttgcctttaaaattttggtatggtaacatctgtaaatttgactaatagaaaatggagaaactagcaagaagacaatgtccacttggaacatgaaaaagtcccccataggaattttgtgttgcgacattgcttgcttctgagcaagttctttagatttagtaattcctccacaacaagcaacttggaagatttttttcaccgacgtcatctctatcttaatggttaagtaggactgggtgtagagtttgggagtaaaccctgttttagagtttatcaatataaaacaatagcaacagaagataaacaaggaagataggaaatttgatattgaggtgtttgtgttcaaattgagactgtgttccttagaaatttcaaggagttcctttttcatagtttatttagttactttgcaatagaattgatatgtttataatttgttggcctctttctagcaatattttcaaactatagtagcctcaagccctatctattttattaaattttcagtgattcctgagtcatgccccacaggctgaaaaccactgctttacagtttgtttttagggctaatattttagttgtactagaaaaatacattacactatatgtttatgtggcatcacaaaccccagtgtgttctttctgtagaagttcgaaaagtcatttgtcaagtgaagcctattactttgtatgctgattgaaaaaaaaagacaataaaaaataaaaattaaaaagtaagttgtgaggaaagaaatccaaagctagcactatccaatttggtttgaaaaacaaatcctgtttacatatatgtcttcagttatgaacggacaactattatgagatttgttgtggtaccaaagcccgaggtgggcataattatttgtttactatttccttgcttttgaaaggatgctctcaaaatgtccacttcatggtttctatgctgcttagaccaactcagagaaataaatttactctgtaataaaccactgagaaaataatgtctttgaagataaatatgactcctctccctgattcttcttaaacaataaaactataattttattttattccatcttgtctgaaggttccttagtaaatttaatattctgttcaatatttttcacatggcgtatcacttatctattattttctttgacttgtttattttttcttcgctttattgaggaaagggtctcactctgtattttaggctggactggaactcatagtgaccctcctgcctcagccccctgaattatagacatgagcaaccacacaaattactagagtgtgtgtgtgtgtgtgtgtgtgtgtgtgtgtgtgtgtgtgtgtgtgtgtctgtgtgtgtgtgtgtgtgtgtgtgtgtctgtgtgtgtgtgtgtgtgtctgtgtgtgtgtgtgtgtgtgtgtgtgtgtgtgtgtgtgtgtgtgtgtgtgtgtgtgtgtctgtgtgtgtgtgtgtgtgtgtgtgtgtgtgtgtgtgtgtgtgtgtgtgtgtgtgtgtgtgtgtgtctctgtgtgtgtgtgtgtgtctgtgtgtgtgtgtgtgtgtgtgtgtctgtgtgtgtgtgtgtgtctgtgtgtgtgtgtgtgtgtgtgtgtgtctgtgtgtgtgtgtgtgtgtgtgttgtctgtgtgtgtgtctgtgtgtgtgtgtgtgtgtctgtgtgtgtgtctgtgtgtgtgtgtgtctgtgtgtgtgtgtgtctgtgtgtgtgtgtgtgtgtgtgtgtgtgtgtgtgtgtgtgtctgtgtgtgtgtgtgtgtctgtgtgtgtgtgtgtgtctgtgtgtgtgtgtgtgtgtgtgtgtgtctgtgtgtgtgtgtgtgtgtgtgtgtgtgtgtgtctgtgtgtgtgtgtgtgtctgtgtgtctgtgtgtgtgtgtgtgtgtctgtgtgtgtgtgtgtctgtgtgtgtgtgtctgtgtgtgtgtgtgtgtgtgtctgtgtgtgtgtgagtgtgtgtgtgccttgtgtgccttatttgtatatatttgtagtactggcactttaatccaagatcaagagcatagtaggtctaatactctaccactcagctttaccaccaacttccctttccttctaatagttgtttttgtctgtagtgtatatgtatatgtccttgtacatgtgtgtcgtcttcaattgtttgtccatgttatattttgaggcagggtctctccttgaagctggagctccatattccgactgggttggattactggtgaatgtctgggacccgcctgtctccatctctcttgcattagcattacaagcctgccattatgcctgggacccaaactcagattctcatgcttgtgtagcaagtattttacccaagaaacatctccccagcatgtctacctcttactgtctttattccgtatgtgggagcactggaatgtgagtgcagcagattatttcaagttatatttaggcgacccctgagatgaattctgagacagtatctgagaagtgtttgctctgcctccaggagtgtttttagcctcaaatccttcccagttcaagtagggtgatctatctggactttggtcataaatcctccatcacaatataaaatgaaagttgaaactcaaatgttactgtgtatgttttattaaaagttcactcaaatttgtaccattgtatctgcaaattggaaaagataactgtaaagttaaagacatatctatagctttaaatgagtttgttaagtcccagtttgcatggaaacattttccccagaattcatatcctgtaatttatggtgtttattcatctcacatctgaaatctttggtgagacaatccatggcactggtatctgctgacaatggtttatattagaatctgaaggtaagcactgtagagatccacatcccaaacacagtagaaaggttatgcatactagaagagatcattgattttacattttaaagatgtttgtgtgctgtaatagtactttacagctatgctgttttatcttggcgatgtgcatatttgaaagactcaaaattgacaacgtaggcactttgttgcttaacaagctattgaaatagtatacttttatgctttcttcttagagaatacattatattataagagactgagtattatttgagtgtagatttttggtttatataacaatggatgctttggagtctaaggatctaacaagcttatactacataatggtctgtaagtctcaatgagaggaatatttgctttgttagtgttctagtgtatccatagaatatgaataagcctctaagatcagttctgctttccttttcttgagacacagtgtcattcactgtgtgcccaggataacctcatattcacgatcttcccccgtcagcctcctgagtgctaggattgtaggagggccactccatgcctggttgacattttctttgctttgtttttaatgatatttatcttcagttgacttttgtagggaagaatagtgattagaggcacacgcatgcggctctcttttgcttgactgagcagactaggaagcatttctgggtccttcctgctcaggtgcaaacctggtcactggctgccttgcatgagtactttcccctaataaactaccatttatcaacttatttctgactccactttgtaatcatctatagactttggcatacatattaatcaatagtttagaaaagtgctacaaagttagggactttaaacacactaatttatttcttacaatattaaaaataattattgtttgcttcatagtgaaagatttggagggtcaggaagttcaaccctttagtccacttttgtccagtctggtaatacttaatctacagtggagccaattttgaaagccattgttattatgacctctgccttgagcatttctttgcataaagcacctgttgtttcagtgtgacaaagacatgtctctgagtacttcagctatttccagtcacgctccagtctccatcctccaggggcaatcttttggagtgtttataaaatgatgctggtctttgttatgtgggttactacaaccttgattaaacccctctagtttcttcatctctaaagtttgggggaataggcctaaatatttcttacattttcctttccttatacatgcacaattcagagagttagtgaaggggaaataaaatctagcttacaactgcaatgcctggagactggactctctccgggctggctgtccttgggtagaacattacagaacatgaagctgtgacacagtgaagggattctctacttcttttctcaaggtaatatcatttgtgctcatgactttaattatgaattctatgcttatgtaatttgtgtaattcatatttttcctttgaactccattcaacttctggtataatatttctacttgaatatcttaaagaagcttcaaattcagcatgcccaaaatgagattcatcctctcaccctccacctctcctcattttcattttctctaattcaaaaggttattgcattgaaaatgctgtcatcaccccgactctcccacagcctctcctcgagtctgctctgccatcaggtgttaccaatgtcttgttcacaatagccatgaaatactttgcctcatgcccatttgctctagtgttactctagcctgaaatatgttttttttcccttaatattaaaggttctacctccactttgcatgccatcctctctttatccagaggtgcattaaaatacactggtgttttcaaatctcaaggacctcatttcatagcactctcttagttctagccttagaagctattgtccagttcttcatcttcatctcactctatcttaccatggatatctgccaccatgattttctgtctggaacacttcctgccctttctccatttgctctgttgaaaaatagtctcttcctttcgacgattgtttcctttcttgcctcttctaacaccatgttctttcctctcagagcactttattccatctagtaattataaagtcattcacagtagcagttgacaatgtgtctcctcgacattcatgtagactacgggaagactccatatgctcactcctgtcaccccagaataaagtcggcattcagcataaaaggtgtttattaaatatttgctagctggctcaacaatcattgtaatttttagggggaatatttgctttcatgttgatttagaccttggctgcactttcaggtttctgtggctttgtcaacatattcaaattgtttagctttaaagaaggaattcttgtaaaagaacagtttaattttttcaatgatatctgagggaaaaaattctgtcttaagttatttttcatagtatgtattgcataagctgaaacatgacattaatttctttgttttattcaagcgggcatttggagctgactaagcctcaggactgcagaatcatcttctcttgtaatgacaaattatacatggcttggttgtttatggcattagaagtgctatttcttgtttaaagaaaaaaaagaagaagaagacatggtctctgaccatgaagagatcacattctaatgagactataaactagaaaaaaaaaaagaaaaaagaaagaaaaagaaaaaaaatgagatactttctacaatcctgttgtagaagcttgtagagtcatcccagggattctgggccaatattattggttggtaaaggtgacagcttagagtttttataagacagactcaaccatagaggggaggcctctatgtcaggacagatatctgaaagtacatgcataactattcaataacttttgttagcaggaaagggttgggagaaaaggctggtgaattgagagagaggacactgtcaacagttaactcccatatttagacagttagaattaacacatcaggatgtcactgcactcagacacacattttctttcgaaaagtgatgacggaagataatgtttgatgttggtctctcctggaatcatcaggggcaatgtttaacaaaatataagatacataggtttgcaactcagggaaatcatgagcatgcatatcgcaagccagcagtagagaaggatttgtcttggagctttgcttggtgagaaaatcacaggatatgtctcagtggaataagagcactggtgaggaacaaatgtgcttcctctgggacagcttccatgttctggtggaaagtattgctcagttgagttcacttgaagcatcagggaacatggaaagatgaagacctcctaacggcatgacttaaaatcacaccatgctttgtgatacagcaatcagtgtcaggactgcaaccatttgagtatcaaagggaacctgtcctcacacgaagtaaaaactctccaccttcttcaaactgggacaggatctatgtactgtaagaatgtaaaagaggcattatcgatgtactcatgaagtagaagcttgaagacttgaccaaacttctgataatatctgtacaaacatccatcaccaccatccatcccctttagattaacctagcttcaggagaaacattattgccaagctactgttttgttactgtctcatgatggggaatgtactgtgtatgtttatcttattgattggtaaataaaatactgtttggccaatgagacagcaagtagatgggactaggagtcaaagaggattctgggaaatgtagtagagaagtgtgatccaggcaggaaatgacatagcaaggagactcatatttaagtggaggagaaacaggaagggcctctcttttcccctctgttcctgctccagcggcatgatgcgatccaccaaccaggagggacaccaacaagccgtccgataagataagttttataaaatatataggtttatgattgttaagcctgagcaaacagatgagaatcctagtcattggccaagcagcattgtacctaatacaagtttctgtgtattcatttgggccctaactcaggcgggcagctggtgtaaagctcacacatggtggtgggctcagacagcctttggcagaaagatttatcataacagtctcatgtccttgacattcaaagattctgtcagaggcagacaacaagcttctctgttggaagactcctattgccttccgtaggttgacttggaagttattctgtttccactgtgaaccacagcaggaaataaacaacacttctcacttcactgcagagtctataagtttccactaaacttgcatgtaccaatgcgtaaggaacaacccttgagatcataaaagtttgtgagatggcctgttgacaattattagcaaataaagatctctgcaaatcaagtcactgaagaggcttaggttgaaatcactgaataaatttaggggagtccaaaagacaggtgcttgctctagattaacaagcactgtcaatggggaagaagtgaataaagctctctagctggcctctctgactttcacatattctatctgtaattagctcccagaggttctctgtcacaggcctggttagggagtggcttctctaaatacttttccattgctacttccattctttatctgaaatgttcacatttaacatactgccttgcagatgccttgccaccaatgagaaagagaaaattactggacaacagccaatttttttttttttttttttttttttttgtggagaaagggtattagacactgaaccctaaggcttcacacatgtgaggcaagggctctatcactgatctagagcctcagctatttttaaaactgaatttattgttttgcacatattgatcaaatgctgtaccactgcctgacacccccagattccagcagcacttagggttcaggaaagcatctttaagtttctatggccaatccaacaatttcctcccagaactctacacatccattcagcaaagaagccaaggaagctaaggaagccaaggaagctaaggaagctaaggaagccaagtaactgaaatcttgactcaactacaactgaaaaaaaagaaaacagacactgttttagtatgtattattggacatggagtaattaatcatatttatttgaatactccttctatgtacccagttttttagtttttaaccatgtactggaaactaggcagtacatgagcttttaaaaagtttgttttaaaggtgataatttaaaccttttcccttacattctaaggattacatacatgtcagtttcacagagagataattgatgtaagtttaaacctgccatgtggatcatagtgcaggttcatatcaaaagcaaaattcaaaactcatgggtagcatgagtttcatgaagttttacttgacaccttgtggttataaggtcaactcctgcttaagactaatagtgagtcttttaaaatgtagtaggagtgctaggacttcaaaagtagtgtgtttctataacgtgtacaagtgcacaaggtactaaatttgactcctcacaccaaaacataaggcaaggtagaggaaaaataatgtgtaatttttttctcttaaacctggggcactatttacataatactaagattcctttaggagtccaagatgttcctttctgaaattgacaccatcctgggactttttttttttttccttctgtccataagaggaatagccattgtaggttctacggaaacaggttgctatggaaaacagcttcaaaaacgattttgccagaaattctgctgttaatattttccccttatagtagcccaaagaaagttcaaagttacaaacagaaatattagaaaaaaacaataagaaaagaacaatgtgctaagaatattgctaatgcttaacatgcaattttaaaaattggctcagtggttaagggtactggctgctcttccaaggacctaggtttgattgccagcaccacattgtagcttattaaccatgtgtaactccagttccaggggctccaacgccctcttccggacatctctggaaatactgtagaatccccattacaaatttcaagttctttcatgcctaggtgggaacctgaggtggcccacatgatggtcaagcacctgggtcggattccttaaaggggaattgagcaccacgattgcagctgtcttgctctttggacaacgcaaaattgatgcagcctatttccccatgctttctaaaatcatcaatacattccaggacaaagggctacatatcataatgaccaagactcttggcatggctaatgggcattctaaaagtcagagcacactgcagctataaattatgttctggaagtctggggcattcgagttggtattgaatgctcagtgtttgttaaatctggaaagcagctttactaatgatgtcaaatgttaagcaaaagtgaaaatcttagtgggcaggcagaggagatgagaacgctggcctaggtgagagtgtagaagattatcaataaaaatcatctgagccaggagctgaagagataactaagcaggccaggtcttgctgctcttgcagaaggcccagattcagtcctcacatctcatgttaggtaactggcagctgcctagaactcaagcttcttgcagatctaatgactctggctttcttgggcacctgggtcacctccacagacccacacatagacacacacagtaactgccagcacgttggtggggcttaccctgcaatcacactctggaagttatgttttcaaatatagtatttacatatcttcagcattataactcaagaaatcagcttagctatgcagaaagtaatgaatttatttaaagacattacagtttcaaagaacaggtccagcttgtccatatttaaagctacatgatttaaagctacatgaaactgagttatttcagctggttttagtggcttgggcctatcatcctgctacttacaggttagagacagataaattgcaggttcaaagtaaaaagtaaaaagtaaaaagaaggctatgggtgcctaactcagtgggagagcatttcccctgggttccccctaatcctaatcctaatgccaaccctgccagtattataaagggatttaaacaacaaatgaaaaataaaaaacaaacaagagaccaaaaccaatcagccaaacaaacaaacaaaacccagatcactaccaatcaaaatgcagaattctggagcccagtcccagtgagcacatctacaaaacactcccctaatgaaggctcaaggaacattggggaagtgggggggggaagattgtaagaatcagaggatcagagagttttctgtgaggtcatgtctcctaagaatgtcagaagaggtaacccagacccaggaagacaaacatactatgtactcactcataaatgggtactagatgtaaagcaaagaataaccaggctacaatccacaatctcacagaagctaggtaaaaaggggaacactcatggaagaccccaggaagggaaaatggttgagatctcctgggtaaactgggaggggaaggtagaagggagaggatgggggatgggagcaggagggatcaagaaggcccagtgggggagggacagagggggagagcagtgaaagagatattttgatagatagagcattatgggattagggagaaacctggtgctagagaaattctcaggaatctacagagttgaccccagctaagactcgtagctatagtggagagggtgtctgaactggccttcctctttaatgagattagtgactattctgtcatcatagagcctacatccagtaactgatggaaacagatactgtgacccacaaccaagcactgggctgagctcctggagttcagttgaagagagggaggagggatcatgtgagcaatgaggggtcaagagcatgatgggaaaaaccacagaaagggctgacccaagtcagtgggagctcacagactacggtctgacaactggtgaacctgtatgggaccaaaccaggccctctgaatgtgggtgacagttatgtggcttaatatgttgtgggtggtggtgagggtggctggcaatggcaccaggacctatccaaggtgcatgaactggctttttggagcccatttcctatggtaggataccttacttgatacaggggggaggggcttggtcctgcctcaacttggtatgccagactttgttggctcctcaaagaaagccttaccctctgaggagtggatggggcatgggaagagaggggggagatggggggcaggagaaggggagggaggagtaactgggattggtatttaaaatgaaaagtaactttttaaataggaaaaacaaaattatagtgggaaattaccaatacggagtcaggtagaaatataagggtatttaatagggaaaagccttacttacagagcgacctagccagctggcatggcagcagtctgtatgcaagcccaaaaaagagaaaccgaaagcgaaaacgcagtcaccctatgtcccctgaccacgccctcacaagctggcacacctgtagccagcccctacaattccccttttagtctaaaagagtattaaaactttacagtttaaactattaaaaattaacaatcataaaggtaaaatataagaagatacaacaatctgcttatgtcacaccctaactatctattttaactaaaccctaaagtcatctgaaagagatgtccaagcctgaacacctccttccaatcccaatcataaacaataggaagctatccctaactaggtatatacactatcctaagtgacaacaatggggaaagggggtgtagcattctccaagttacttcctgctgaaatgggatgatgatagtcatgtggggtcctgtaggaagaaaatgtcagaagctgcagccaaaaactctcacaaacatgtctgacccagtgtgggctgaacaaggatgccatcaatagaaaaatggatgtgctataagcctaaatcctacacaaggaactttggcaaatgaggagagctgggagtggctgaggtggttttccctggggaagtacacaccaattgaccaattgtttagtgccaaatggtaaaccctgaaaacacacatacacgtgatatgtatgtagacacacaattatgtacacatacagactgagtaggttatgtttaggaatatatatgtagatacatatgtgcatataagaacaattactgaaagatcaggctgtgattttgaaggagggtagggagaggtatatgggagggtttggtgggagaaaaaggaaggcagaaatgtaattacatcataatctcaaagataaaaacaaaaaggagtattttgtcctatattttaatcaaatagcaaagcagaagttaaagagcttgaaatggttcagtccaagggtgcccatgaaaaagccatcactcagacataaagagtgatattaatcatttacatagcttaactaaataaaaggtagagcttgttaccaatagtgtctaaaactataaacagttcaaagggccatttgaaaatcactaacaaggagatatgaacaggggaaatggagtgctcgagttttatgctttttttttaatgtcacttagacaattcaatatttctaactagtgtgagagtaaaacataaaattgagcaatgaatagaaccctatttcagctgtcatttccattctaataatgactttaataccacactgaagttaggctggatgtgacatttctattctggctagatagtcactctgttactgggccaacaaattacctacagcggatgcagggtggcatctgaaacaatgttttcttagtagttgcaaggcattggctgaatttctgtttcaaaagcaagatgtgtttggttttgctttttaaaaagcagctaacatgatttatttttttctagtctttctgactccttgtaatgatatccaagtcactttctcaatggcaggctgtgtgcatgttttgtagctgagtccatatgctgtggccaaatcaatattattgccactgtggggcagttgccaattatgtccaacatggcacagagttctgactcaggttttcttaaaactgggcagttgttggtgacaatgacagtttcatttttcccccctgtttgatcacccctagtacctgcttgtacctcagcaagtatttcccccttttcataataaaattggaactgagagttgatcaccttcagcaactttcttgtcttctctgtgctcatcacttcctgccttgggttctggatagcctctagccaagagtgctactaagaatgctgggcaatgagaaaggctatctgttcaatccttaagtgctattttcacttaattacagccaagcccataatctggagatgcctcctagcctttaacagtctttcatgagtgccatcttttattcctcctgacagatattcatcgaaactggaccctcctagtggatgagagtctttctaattgctctcatatctcatcattagttttatatcattacatattgattctgactttcccccgaaatacacgctccaactttgttaactaattcctttattatgatgtcagtgcttagtggattgagccatctggaatattactgtgagaataaagcacagcaagtcagaggcaatcttgaaaatttgttttgggagatttccctgatgttgacatattccattttcattttgtagtaatctactctggaatttgcttattgggaatgctgcctttttttttaaagcagcagatatggaagctcacttctgtttgctcctgagagacttcttcaaatcctgcaaatgacagattgctactgcattgctactgcaatgcctggacgatgtcttgggggagggtcctccacttcttccatttgctacattatttcctcctgagaagacacccatacagtacactgactctctgttggtgtaaaactgagtggggactgatggcagtgttgttaatctggacatggttctgtgaaatagtgaattagaacgcacagcatctaaagtgtctgtgtgccctgcttcaatgcactgtcgtaaagggtctgtgtgccctgctgcaatgcactgtcttttctacatatggaagcatttggttttgtcttcatggctctcattgtatctctgaacacatgtagaagggatcccatgattcctctcctagtcattcttggaatagccaccaccctgggctaacctgctctaaccattccctgttctcattcttttctgtgcctatgcttttcactgaattggttttatctggcatttgtccctcatggatgggtgacatgatctttggcacctgaagagcagccgtgttcatcacttcagccctcagtgcctggcatgcagacagggtcaatgacataaaaaccagggacacattcagatccatcttcagcaaatgtcatttcccactggttgcctgcataggttatgtgggcacccagtgcttcctggctttcctgtcagcagcaacacttagatgatggtggctgcgctttgctctgtgttgccacctcatgtggatttcatggtagataatcgggaaactgaacacagatgtcaagtttctttagaatcctcagtctctcccaattgattgttgtttgaattgcacttaatttttagaacattgaatattcttccattcaaatgtgatattctgccaagcctgaaggaagcagcaaggcaggggagagacctgggtctgtttctcaggcttcagataagaacaccacatcttacaagacagctctggtcccagtgcacctgtgattgtgaatgtggtttggctacaagggctgccagagtaactttcagcatctcagacacttacgctgagctaacattctgcaagcatcagtctttaaatataatatttatgtatcttcagcccttatgtaacaatggagagcagttaaataatttccccacatgtaagaaatataggggccattttaatctaaattaatggaaatgtaatgaatacagactattttatagcagattaggatatggaattacatatgtgtgcaaatgctacataaactgagaagcacagatatctatcataaaatagaagtttggtgaataataatagactatgttttgtataatatttgtgtttaaaatttataatatcaggttattatacatatatacatgccctggtacaggcaacagaagcatacttcatgatccagaaatgatatatgaaatcaaaatcttctgtactttttgtttctctgcatgattgctctatctattcatctgcctatccatcattgttatatttatctgtcaaccagtcttctatctgcaaaataataagatgaaatagaagcagaatattaaaagactttatatgtatattacatattatatgtaatgaaacatgttaattctagtcatataatttatttacatgtacaaatattgtaatctcttctatcacgtgtaatgtatatcatttctatgcatgatgcatacatattacatatatatctagatatatctatttcagtggtcatccttattttaacataatattttaagtctttgaggatttaatacatacatacagtgacacagtgagctgagctgaaagcaagtgtcgtgttcaaagaaacaaggacagctccaaaaaagaacaagaatgaagaacaatggctggagactagatttctctgtccttgtgtaagctacccttgaacttataggatagagaggccccataactgcctcaagtgttctgccctttatccttaccttctcctgtccttgagcagcagaggggacagagggctaagttgctaaagtgttgacatgttgagaacccaccatggcctgtccatcatttccttccatgaaccataatctggagagatcacatttgcatcccagggaaccactctgtcccttgcagtcattctctgttcctcctgatacctctctctgatcccaaatccacctgctggctgaccagctttttcccaggcaacagttatactttgtgtaaatataagataacttccctttgccccttcttgttatgaaataattaggagttgttcttttccttttaacttggtgttttaaattatttgacagaaatcatgtgctccatttattccctgtacacataattccatcagcaaggagaacagtgcattcaagtttcacttagagagggaaaaacagaaaagggaagttatgtgtggagatagctggttttgtcactagctgtttgggcagaattagctcaaagggtgaccaggctacttagttgtaggttagggaaattgttggcacaaagtgagatttcactgcattaacaaaatgacatgtttagcactgacctggagttcccattgaggggttgaggaagatcccaagttcaaggcctgtctggactaaagaatgagttcaagataagcatgggtaacttggtaagactctgtctcaaaaggaaaaaaaaaatttaaaggctcaggagacagctcattggtagagcacttgccaagcattttgggggcccaatattaaatacataatgctaggagaaaaagcaaacaaaacaaaacaaaaaaccactttgaaagctccaactttatttatatacattggacttctttgctcagcaatattttccttgttatttctcaaataaaagaacgtaattggccaaaaatatcaagattcacaagattcagactgaaatctcttgaccaacaggaacaacagaggttaaggacaaatgttcttccttcaaacactcactgtagctggagtctatatctgaatgtgtgggcagtgaattaagttcaggaatccatttcttatgatttttcttttgaagcccaagattattggcatagtgatcatttttcacctctcattaattccagtgaaaatataaaacttcataaccattatagccctgactctgttgtatgagtgcttgtctatctggctttaggtcatctccaatgaagctcctcagcatgagccatcaagccaagtgtctgtcctcaccctactgaaattccatgtgcacgaataaaggttgtcgtctgaagtcatgttggaggaaagtgagacagtgtgtatgtctgtccaggaggatctgtgcccacctgtaggagttcagagtggagagatgctattgggaagacagggatagtcagaaaagctgagctggaggaaaagaacatgaggacacaaaggactaggaagggactcctagaagcacttactggggcagaaagtgaaacctgaatgaaacagataatctatgttgcatacatgtgccacaaaaagaacctatgcttcatggcttctttggagatcctccttacagtctgccttgtggtctattagtcgtgaaagtcattgtgtgattgcaagttagaacgtggacattgctcagttagaaggaatttgagattgagtttggtgatgagcaggaatagaaggcacactcaaaggagttgtgccgatcatgccaaatgcatgtaaaggtcagtgtggtacaagtgacagacagattcactggctccaatcttctttcattccatatctttaaacctcattggtggctctctatagaaggataacatttgtgatctatacatggtggtggtggtggtggtggtggtggtggtggtggtgtgtgtgtgtgtgtgtgtgtgtgtgtgtgtgtgtgtgtgtgtgtgtgttgctgaagctcaagcttggaaccttactcatgttaggtaattgctcaaacattgagctatatacctagcctaagataatatgcttttactgcctttttcattcagaagggtgcccctcttgaagtctactaagacctggattgtctgaggtgaaacatctactattctccatcttcgtttccagagccaaactttgataatgaagggttaaaatgatttcagtgcacaaagtcttttgcttttaaagctttttgctactgacctagttctctgtatcttagcctaagcctgagaaaacccaaaagggagttaaaaatagaattagcattttctttaaaaatgtaaagaatctgcctcttttgaagtagagtaagatggttttctttaatatttgacttgttttccctcctgtggaaggcagccttcaaatggacaagcctcactgaagtcattctaccccaaaagcaattaagatcaaataccagaaggctaaaaatatccttgttacactttcagcagaggttatcggctgtttctctccaccttatggtcaggtggccttttagcaggggatggatgctgacggttgccaggggctaatgtggtgagagaacagtaaataattcaaaaatagctgttctcaagtgctgagcaatttggcttgtctaagaacttaaagattttcttgtgtgtctgaagctagtgctaaatccaaagcctgtgttataaccccaaagcctgtgttataaccccaaacctgtgttataaccccaaagcctgtgttataacccccaaacctgtgttataatcccaaagcctgtgttattttaaaccattctatctgtggagttaactgaattataagccctcccatttaagtggcccagattttggggtttcctttgggtcacaatctcatcccgacctcatctgtacatttcagtggtggcactctaatcctcccagttaagggcaaggagagaatggagatcagggttggtaaatcagagccgtgtggctcatacctatctatagtatgaacagaggcatgtttcttgatggtttggttagctgctgtgtgtaagtgtgaagataaaatgctaaagtggtactgatgcattccagttcaaaattattgaatagagtgaaattctgcccaagttttaaacacctagatccatctgatgctttttggcaactgacaaaaacaaaacaaaacacatctgttaactaacttttgtgtataatctttttatgtatcctttcttcttcaattcctagctgtaaaagttatttgcatctggcaagcaacaacttttttttttaaacagtttgaaacaactttcaaattgtatttccccatgctttcagctcaaagaaagaaaacactatttttcctcttagaattaaaacaggaagctgacagttgatcatctcctctgtggcacaggttgcagggatgctgtgaaagaggagagtgcctgcgaaggatggtgtcttagttacctttcattaccaccacctgatgagaggcaacttcagaagggcttcagttcacagcttgagggtatttcctctcacagtgaggaagccacagccacagggacatgggacctctgcttacataatgtggacaacccagaggcagagagggcaccaaagtggagctaagctaagacccttaaaacctgtccccaacaatcctttttctctagttacatcccaaaccctaaagattctacaaccttccaaaacagcacaaatggctggagagcaagtgtttaaccaaacaaggctatgggagacattttacttctaaactgtaactgatagcaggggaccaattagtgccgctgagtggtatccgctaacttctccactgtaccattttaacctggtacttgacactttacttcctctcagatcctgagaagttaggaacatgactttggtcctgtattcttactccattgcaatgtcattggtttgtctttttctaaggccctgaagagtaagaactatgctttacgtttcttgcaacaagcatcagaggccgtgatggtgttcagaaaaacttttgtggaaccaacctagctttgtactcacagtatacatttttcatacatagccagttcctgggtcactggttttaggcaccatgtactatttgtgggtaccatgttctatgaattccttgaaacacaaatgggagcatagtctaccaggctctactggagatttctaaccccaaagaaatagcagtagaggatctggtgatacagcccagtgatgaagtgcttacttagcatgtgtgaggttcagagttcaattctcagaacaggaaaataaaaattctgcaggaatacagaaagtgtaaaaggtaactgccaggacaagggaaacagaagaggtagaatcagtggaagagtactgggaatacttctttttttccagaataagggaagtgatgtaggtgcagaaactgttctagtaggcagagtggcagtctgacatccagtggggagaggcctgtgggaagcagccagcttcttggaggtgtgtattgtatggtacttacttaaagaatggggttagaaactgatggatttattgaaagaatgcatctgaagcttccctccttctatgctgcttcctggtgaggtcgtgagtttctttgtgaaatattaagaagtgctagccacagtgggggatcctgagatacaaaaagcacaggaccacaaaagctatattgctgaatggggagctgtgcatttcttccctgtgggcagagtgtgccgacccccatttgacaccacataggtgagatcttgagaaaaactggagactccagagaaaatgggtcctgtgtcctcgcattgttttcacctagagaaacttggaagtataccagagtaacgtcatccttgaaaacagatgcacacacatgcacccctagagaggtgagggccaaccctgccttccttaaatgtctttcttcagataactgatctcagcggtgggaaacgtaattaatataggggagaaaacggcaaatgataaggggaaaaaaggaggaggggaatgggagaccatcttccctttaaaaatacaatgctatgtaacaccttttactagtttagatgtttgctttgatattcatggatgaatttactaaatttattagaataaattttggaattagtggtttaggaaatggacagaatgagaaatgagtgttcatgaaatttctcattatagacccacaatctaatgatctagctgataaatatgtttgaaaattacctgatagctacatagtctcaggaattatcctcaactcttccatgctactcatcaacttgctgatttgacacaagttagtagagttttacagcatgcctgactccttccctgccaaaaagaagacagtagggtcaacagcaaacattcagagtcttggtgatgatgtctatgactatgagcaatgtcctgattgccttagttgtggttatgtcctataagaatcttttgtttaaatgttacttatttgcagaatgcactatatatatatatatatatatatatatatatatatattatgtacagaagccaaacgaaaattgaactttattttctatatgaaaaatactgacctcacagctctatgatgtattgatacctgcatgaacttgacctgactgctggtggctggagaaatgtggtcaactgcaaatcccagcagctgctgcccacttcacctctttctgtgttactgcttttagttttaattttgaagctaagttgaagtttatcaaggaaagattttagcacatatgtaagcatgagcattagggggaacagcatggtgtaaaaggataatctgtgctgcactgggcgtaggcttctccggggaacagctctgtattattgctttttgaaaagttagtgaagagctttgaattcgtgattacatctttttggagacagggcattaacactagtctttgtctactcttgatgggatcagttactcaggcattcacactctacctcaaaactaattagaaagattcatttttattctcattttaattagtcctgtgagtattaacctattctgactcttaggaaaagatgcatttaaaagagctggagagttggttcagcaggtcaagtattcaccatgcaagcattgagacctgagtttgattcctaatattcatgaaaaatatatacctataatcctagcactagcaaagaagacacaggaggatccttgggatttctggtcagctgatctacctgaatcagtgaacttagctgcagatacagtgagagagactcatgctaacctctggcttccacatgcatgcacatgcataaatatgtaagcacataggcatgaacatatgtttacaatcagacataaacagaccaacaacaacaagaggaaaaatagaagaaaaattcccattttttttttctgtaagtgcatggtatttatttatttacttatttatttattgacttatttttgcttgttactcttattttgtattcggggtgctgggactgagcctacagcttgcatgttctggatacagtgagggctctgccacagaactgcatcctcaactacattcctgtgttctggagtgtcctccaacaagatgtgcagagataaaaccctagaatcccagttctcagtggtcctccagcccccactttctgacaagccttgattgaatgcctactattgtctgctgacagaaacgcaaaggacacaactgacaccacaacacagcagagaccactcctttaactttagccaactgcagcttttcatcagagaagggaacattaaggtttaataacacaggactgcagctcacatggctaattagcagtcaagccctaagaaaactctaacttcctgaggctaagctatgcaaagtagggcattctgtatttcagcccaggaaggaaacatatctttcctctttctactataaaacagctaattatttgtttcactattcccaggggctccttaatgtctgtgtttgtctaaagatctttactctgctatttccctcacatcatggtagggtggggcagcaggcatttcaaccttctgcatcagggtatcttgcagtaattttgtgctcaacacatcaaaatagatgttaatttcgttcttattgtccttaaatcagtcacacatcttaatttaaaagcatcacttagtttcagtgaagtttagatacagtggtgactgtggatggtagagcaagaaggaaggtggccagtgggactcgtgtagtaaaatgaggatgtctagaagaaagacatccaagaatgaaggtttgaggacacactgtgtgaagatgaaagcaagatctcatagtttttccagttaatagatgagactagattgtgggtagggaaaaggaaacaaatgcattcttcagctagccccttacaagtcctgagaccaccttccctcgtttggttgctaatgctggcaaacagaacaattggagctgaaagtggctcctacccttcagcacatccctgtaagcagggagcgtgttagctccagtgtcttctggcacatgggaacgtctgcacactcctccactcacatgcaacatggtaaaggatgaacgctttcatgggtaatggaaaagacttcctaatgatagtaaagtgagctgtgtacagacggtacttgaaatttcttccataagatgacctcaacaacagtttcattagttttcttgttcattgataggatacgtgctacagaatactgagtttgtttacataccttttcttgttgaagtcttaaagatttttttttttactatgcatcatctaaaacaattcttctcttgtaaataatatttaaaatgacattatatgagtcatggcaaatattgggtattgttctgtgatatataatttatttaatctcaataagttttcaagatacatttatcagcttcatttaatatttgagagatttaaggctaacaaatatctcatcagcaatctctcagccaattgctgaagctcgtttacatctatgtagtcagcctagctcctctgctgggcaatgtaccctgtcattgaatttactgaatgtctcaaaaatggtttttaaagtaaatacataaataagatgctgttttaaataacaatggtctggagagaatgtgaattatcttctgcagctgagcattcatctttcaaacttcctgatagcaagatacgaggaaatatggaagtttaccgaatttttactgttttaaagcagaatggtttaacaagtaatgaatttgatactagaaacaaattataaagaaattgcaatattcaattagcattaagaccaatattgtcaagaagaacattctagaacagaggtactcaacctacccaatgctgtgaccatttaatgcagttcctcatattgtgctcacccccaccataaaattatttcattgttgtttcataactgtaattttgctactgttataaattacagtgtcaatatctgttaggagaccctcaaagaggtcatgacccataggttgagaaccattgttctagaacatctaattcaactgttcttccagacagagctactccatggaagttggtgtttgaagcttgggtagtgtctaaagtaacagattcctttgccagacatttacctttaagtcttttgatctgaacaactatgtcatcattaactcctgctgttgtttctttgtatctgtgaaaactgaccacagcaaccagctagttattcatgtacaactgacaagctgtggtagcctatcttccctgtggattctttaggcctccagctgctggaaatagaacacagggtaggaagaaatagaaaagcaggtgaaagcagaaagtttaaatggtcctggaataaaccattcaccttttaagagaaaagagtcatgtttaaaatagctgctttgggacctgtccactttgtcacctgcctcctgggacacacaagctgagaggctgtaattctgctctgaatctcagtgaggaaacctgcagagggtcagactttaggccaaaccagaaatgagacacatgctattccgaggagattatggaagagataaatgtggtgatggattctttactaattatcactctataagtactaattatcactctataaggggatgtctgcttcaactgcagcctgatcattcggtatttggagttacaactgttcattttctgtcttcttcatcttgctaccatacattgggtttacaaaagaaaggtccagtatttaagcactccctgtctccatcactccatcactgcaaccaaatttggcaaacactaaaagaatgtttgtgctttgagttacatgtaaaagtgaaacagatgcccagattacagggtgttcctggctttaagcatgtgaactcagtggataggatggtgtagcctctcccaatccagtggagtatggagtgtgttgataacaacattgtaaggtaaagctcttttgtattaaaatataaagtaaaagttaaaaaaaatatagctagatctgggttacctcactcaggatgattttgttctagtcccatccatttgtcttcaaatttcctgatgtcattgtttttaacagctgagtagtactccattgtgtaaatgtaccacattttcattatccattctttggttgagggacacctaggttgtttccagggtcttgctattatgaataatgttgctgtgaacatagttgagcaagtgtccttgtgctatgattgtgcatcctttgggtatatgcccaaggttggtatagctgggtcttgaggtagattgattcccaattttctgagaaactgccattctgatttccaaagtggcatacaggtttgcagtactaccagcaatggaggagtgttccacttgcaccacatcctctccagcataagctgtcattagtgtttttgatcttagccgttctgacatgtataagttggaattttagtcactttgttttacattttcctgatggctaaggattttcagcagttctttaagtgcatttctgccatttgagtttcttctgttgagaattatcttttagacctgtaccccatttctaaattgggttttttgtctagtttcttgagttctttatatattttggagataaactctgtcaaatgtggggttggtgaagatctttttcctttatgtaggctgctgttttgtcttattgacaatgtcctttgcctcatgcctctcaatttcatgtactcactcataagtggatattagatgtaaagtaaaggataattatgctacaatccacagcctcagagagtctaggaaacaaggatggcccaaggagggacacatggagatacctgggaaagagatatagaagagatctcctgggtacactggagtggatggggatagaacatgggggatgggattgtgggcaggatagagggggagagtaatgaaggaaatgtcttgatggggggcatttcagggtcaggtagaaacctggtgcaagggaaactcccacacatctacaaggatgaccccagctaagattcctagcaatgacggataggtaggtagcctgaactggccatctcttgtaatcagatttgtgactaccgtaattgtcatcagagagccttcatccagtaactgatggaagcagatgcaaatatccacagtcaagaactggactgagctttgagagtgacgttgaagagatggaagagggattgtacaagctagtgggggccaaagtcatcaaaagagacaactaacctgggctcataggagctcacagacactggatcaagagctaaggagcctaattggggctgacctaggccctgtacatatttatgacaattgtacagcttagtctacttgtgggactcccagcagtggaagcagggcctgtccctgaaactttggtaggcttttgagaacctattcctcatactgagttgccttatcaagccttgatatgaggggaggagcatgtcctatctcaacttgatatgccatcctttgttgacagaaggcctgcccttttctgaatggaaaaagaagaggagtgaatgtgtgggattggggagggagaggaggggtggtgagtggagggaatgagaggagaggagggagggaaattgtggtcaggatataaaataaatgaataactttaattaatgaaaaaatgaagctagaatccttaccaaaaatctgtagcctttgccatgctggtgtttttcttgggctgtatagtaggaccgtactacagtgtttccccagactacttcacccatgaagccagttttaggactcttagtacagaaaacatggagtttaacaaatgtgcttcctggagtagagtgtgtatagggcaaagagctttgaggaaaatgtggactgtttgttttaccttcctcttcaggaagctgaagatactagcaacctcgggagacagttcagtgtggattctagggaaacgactttagttttaggtcgtctattttgataatgctcccatgcgaatcgctctgattcctcagaactattaaattccattaacgagattttagtctgcagctctcttacctccctcacttgggtcagatttccattagtaatcagatttgggtgaggagccatgagggaataggctgaatgaaagccacgtggatgcactgattcttagacaccttgccttctgtttgtctaccaaacatttgagatgaagcaaagagattggagacagtcaactgaggagtctggcgtaattgctatatgaccttgtctgtgatacctgtttcacttcgtctaactttatgcagtcacctaagaatatgtacaaggtgtgtggagaggtggctcagtggtttagagtttgtactgctcttgcagtactggagtttggttcccactacccaagttggtcagctgacaatcacttgtaactcaagcttcaaggaaagccacactctcacctgaactctgcagacacttccactcaccccacataccccacccctgcatacgtatgtgtgcatacatagacacatacataataaaaacagatcttataaaaagattatctgttaatcactttacataagaaggagtcccttcatttttacagaaggtggctatttttctctttctttctgagacaggtttcatatcgtagtccaggctggtctaaactcaagacaatactcctgtgactatagtttgagctatcatacctagctagaaaatgatcttccagtaaggttcagagatggtgattgcattaattatgtttctcttaactttgacaaaatatctgacaaaagcagcataaagaaagtaggttaaaaaagattcacttcataatttttcattatgtgtagaggtgtgcatgtgtgtgtgtgtgtgtgtgtgtgtgtgtgtgtgtgtgttgtgtgagtgtgcacacacacgtgctacctgacacctgacataggtgctggatactgaacttgtgacctctggaagaacagtagctgctcttaatcactgaaccatttattttggctcacagctcaatggtgcatgtcatgggaggggggggaagggcgctaagagcttgagacagatggccatgatgcatcggccaaagacgactgtggctcagcccctttctcatttttattcagtccaggactccagtccatcgaattgatttgcttacattaagactagtcttgtcacctcgattaacccagtgtaaaagtcctttacagacataactggaagtttgtttccatggtgattctgaatctcagcatatcagtagtcaaggttaaccagcacagtgacaatgcaagcagatgtttattcagtgactaacagaagtgcaggtgtttattgatagaacaaaaatagatccatgagcaaacttgctttaccgggatggaaccaatgggctgggggttttgaatgtcggtatttaaccacgcctgggacacagaactagatattccttctagttatattgattcagcattgtgcaggggaggttcaacatgtcagatttagtagataacaccagacaatcgaggttcaggtagactagcaggaaatgatcggggctttcacagttatgagcaaatctaacctggatgatttcacctggcttcacctaattaaattgccccttacaacttagctcaggcactgcccccttctcctttcattctgcaaatctgatttgtctccactgatttaatttgcctctcacatgctctcagagcaaatgatctatggcgttatcttatcacttactatggacaggctaagacttgagaaattcattttattggcagcacaaaatacagtacaactcttgtatcttaaaagaatctgaatagtaatataaggctaaagaagttcacagaactccaaactcatgcactcttaattgttttgttttcagcaccaactatatcaacatctagtttttatctcagtgtccttattgccccactgagctgagcaagggctgcttgttggataaccaacttcaaaacctatttacttatatgactcacttgtttattttcaccagtgtaaagtgagcccttagagagtgtgtgactcattcattattctattctcagagtttctcaataaatatttgttgaattggacttccctgcacctggtaggaaattagaaagtcaatcgcaccaagctaacattgtcagcccaaaggaataaggggggcttacactctctatatgtaaaacctattctagttttcaagaaggaaactggaggttggaggagcagcataggtatcaaagaaagaaggaccgatcagtccttcctgcagacacaattgaagaggacagatagtgaaccacaaatttggcattcaataccagaactgagaaaattggcaaatgtggttaatactgaatcacaaagtatcagagcaaggcatccatcacccccaactgaagttacaaattaatctagaaatcaaggtgctagtgactccattgaaaatattggctcattggctggtttaccctcctctattcttgtcctttcatgtgcacagtgactgcctgctgtgcataaagggctaccacacagagtacggagggtgagcactgcagatgtggccaccataccgcaacaccacgctgcctctccaccgtggggcctgaagcacagcaggctgacctgtgagtgtgtgtgtgtgtgtgtgtgtgtgtgtgtgtgtgtgtgtggactgtgctatccagttcaagggaatgcatgcagggtttcaggaggcattaatcatcaataacttgttcccacaagtgcaataagctgttatgagaaatatcataaacttggtggttgactttggcaaagaacaaggtgtgattgttattaatgggtgtgcaatgggctgaggagtatatcaaagatggagttatgcagacactagtggtaacttctagaagaacattctgtacttgagtcccagacattcatttatttgtgtacgagttgtcatgtgactccatctcacctgctgaccattttaaaatagacactgaatatctgctgcagcactgagctgactgccttctgatgactctaacaagcacatagccttcccctttacatagctgtcaatctgttgggacaatgagatgaataggctaacaagatgcaaggcctcacaacttgtcagcagccttctggggatagaaaccatgagtaatgagagtgtagattctacagtgagaatattcctagttttaaattgttgccaccatttagagtctcctctctttgcttcagcatcctcactagggaaggtggaagaaatgacaacttctcaaggttttcatgaggatgaattgactgatgattaatttaaaacaatgcttgtattataatgagttccagcaaatactaaaagattatacttaaactggatttgtgaatatagacatgaaaagctggggactcaagcaatttaagtgacatgcaaatctttttgttagtaaatgtaagagccaagctcaggatactaaatctgtaatgtagtcctatgtttctttctgtaatatttgtttttagacaaggtgtaagtatgtgtcaaccatggttggtatggaattggatatgtagactaggatgactttggactctaaaagattcatcagctcctgcttcctgagttctggaactaaagacctgtgccacaatgcttgattcggtgtttttattgtaaacaatccacattccaccaattttaaatcaaaactcagaccaagtgatattcacatagtacaggcaataaaaattcaacttgcctaattctctacaaaatggtgtagatgacaacaacagtgttaatgagatcaggaatgcagaaagcatagcattgtcttggaactgaattacatatgtcaccgtcattttagtcacagacatgaagtgcagatcacatgctctaaggaaaccatggggaggagggagcagcattgtctgtattctaaaagatagaatacctgaaggtgggaaaggccctgcaatcaggcaggtcagctgggcttttatgtatgaacatgtttgtgcaattttaattatgcttgccctaaaaggaaccactgcttattacggtctatttaataataactatttattccttctccataaagaaaggagtgccagatcccataattagcagtttaatgtgttgaaatgaatggccccttagaccaacacaaagccaaggggaggacatttggatagtgattctatgcttacaaatgggggcttgggatgccaggagagactgcagatggccccagttacatgagcacagagaagtgtgtctttgattcccattatttgttcatcaaatactttttgataacctgatggtgaagtagtaaaatcatccaaatgttacaagtatgcatgtaggcttatatctaatagggagaagcaggaatgaagacacccgtggatatataaatatgaaaatgaatgaaaggaagtgagttctctggtgcatatagaaagcttaaccaggatgttggttgaacagggggaagattcgggaacgaaggtaaccgttgggagactatagacaaaaagatacaaatgaaaagatctataaagaatatgaagaatctcaggatgtctttctagacagaggaaatgtggtctgtgactattctccggtaggaattagattgctaggttgaagtgttgaatgagcaatagcaaaacacagcctagtaaacaatgaatggttttgtatgagggaaaatttaaatcatcatgactagatcatactgattttttaatcataattcatgttgagataaattttgtttttcaaataagtatgaataccctaaatgcaaaaatgcaatcttgtgcactttctttctctctcagtttctctctctctctctctctctctctctctctctctctctctctctgtgtgtgtgtgtgtgtgtgtgtgtgtgtgtgtgtgtgtacatatagatcttgtttcctggcatgtagtttcccaattacttggaggttcctggagggtgagtacaaggagaagctgtgagcttagtagccttcgctacatgtctttccctaagcatttccactacttggtgtttcttctgggtcctttagaatacattttatgcaaagtgaataaaccttactcacagggatttggatttgtaactagggggtcagaaacataggacaatctgagattgtggttagcatctgaagataggcaatagctcttgtggactaaattcttatcctgtgaaatctcatgctgtctccaggtgaagagcgctagaactcaattccacaccattcctgttttttcctaaattttatacttaaaattttgtacaaaactgaaaagcattacaaaataattagaaatattattatatattatgacgtcctgtggattttggttggtttttaaaaattgttatgttgaggtaagatctcatttgataatgtggactattaatttgaacaaaatttaataatttagtttaattgtgaagttaaactcacgatcctcaagtctcagcccgagtgctggtgttacaggtgttcataaccaggcctgcttacacagtgaaatttcatttcaatctatttttaatctgggccaaaatataccaatgcggtatcatgaggaatcatttgtgacttattggaacaagattcttaatatgcgagttgagtgtactaagaaagtttagatttgatgtgattagtgaataatgccattgtggtgccttaggtaatcatttacagaacactgcttgctagggagtatgtatttaggagtggaaacagggaaagcggtgaagtgactgagcctttcgtcatcaagatggagatggtggctaggaccaaagtgaggcagtgaagaggtaaaatgtgatcgaaaatgctgatgaattaatgtgtggaataaagagaatagaagcatgtgttggtatcagcaactgggtaaactctggcatcagttaacaaccttatgaaagtacatgataaaggaatggatttaaatattggatcggggaatggtgaacatttatttacattgtccatgagacactggagtagagctgtcaaccaagtgacagctttgtttcctatcagatgcatgcagtgaaatattgacatgtgatgtcagttagaaatgtttgcatgtgcacatggacctggatattgtcagaaaagaaaataaggcagatgcaactgggaggagaagtgaaatccaagtctgaggtcattctgacactaagaggatgctcagatgctaaagtgatggccatgcaagtgtgagaactggagtttgtaaaaggcctgtgtgcttatctgtgcttgcaatcccaacactggggaagataagacaggagggtctctaggccttgggggtcaggcaatttaaccgagtaaggaagttccacattgagtgagagaccttgtctaaagaaaccaatgccgatatcatctaaggaggaataacacataggtcatcctcaagtctccacacacatgcacaccagcacatacaggaaaacacacacacacacacacacacacacacacacacacacacacacacacacacacacacttggaaaagtttaaaagaaaagtatcagaggaggagatgcaaaacaccttgtatttggacagtaacccctcagagaaactgtgattcatctgtcacaccagggctacccccaccttacctctttgctgagtggtcacagttcagcactctttacattgcagatggctctaggattgtttttgagtctagttttatatattctccttctaactttgctaccaactgggtgcacttggggcctctgttttgcctccctgtctgtctgtcttgtcatcacgttgatgcttatttattgagtctaataacaataagttaccaagcacaagtctgaatagaaggtcagtataaactcttgcattaaaactgtcatgaaagtaatagtgaaccccttattgctaagtaacatccccttaagtacaattacttaaattcagccacctcatgggtgaaagggtattaaacctaaagatgtaagactcagtggaagttggctacatatttacatagagccccccccacacattttcatgtacttcattgtctctagttacttataatacacctaatataatataaatgctactaaaagttgttaaaattatagtctttgggtaccaatgagacaaataaatttatacatgctcaatagagatatgacttcccccaaatatttaaaaagtcacttcctctttctccttctcaattgctgtcatcattttcttcctcctcctccttctcttcctccttcttgtcttcttttgtgtgtcagttagtgtgagagagaacgtgatcttctttctttcccctccttctcttctcttctctctctctctttctctctctctgtgagtatgtgtgtgagagagacacagagagacagagtctgtgtgtgtgtgtgtgtgtgtgtgtgtgtgtgtgttatgtgggggccatgcaacagcacacttgtagtggtcagagaacagttttacaggattggttctctcatttcatcttcacaagggttctagggatgatactcaggtcctaagacttgtgtggcaaatcctttacctactaggtcatcatgctatccctacaagtattactgatgccaggcaggctgaccatggatctgaaatccattatgtggagaacaatctagaattaataagggaacaccacataacattatatcattgggattttccatattctctgttgaatacagtgatgaaactttattttgtattgtcaaataagctttttaaccctgagaaaacactctcaagttctagggtcaatatgggcaatccctgataacaaaaagaaagcctgtatctatacagccacattgaacagcatcctgtagccaagtagacagaggctggatggtcctactggataactgtcagcctacaataacttactagcagcatttaagacagcatttgggaattgtgtgtgcgtgtgtgtgtgtgtgtgtgtgtgtgtgtgtgtgtgtgtgtgtgtgtgtgtgtgtgtgcagctaaagaacccagagacctaaggacgtgaaagtctgggaaaagggggtttggtggttcatttgtataatctcatccctctgtgcagaggggcaggaggattatggattctaggtgactctggacacagtgagtggccctgtctcaaacaagcaaacaaacaaacaaaactggatatatttaaatagatttttaagaatttttatttgtttgagatagaattttactctatagggcatgctgacctggaactccctatgtagcccacggtggcctcagactcacagcaatcctcatagcttggcctttcaccgccctgattttttattatgacatttatcttgcctccaagtttcactgtaacatcaatacatcaatttatttgcttgattttttcctgttaaaaatctaacactttctcagtgttattttatggcaaaggtgtcctcttctgaattcatagtcctaagaaggaggccatatatacgatgctgaaacccaaggggtttaatcaaaccttgtatggtgtctttcaccaagataagaatcaagataagaatgagggtgaaagtgtgttaatgtatgagctaacaaattcaacatgattaggctgcatccaagctcagctatacaaatgtgttctacttgttttttgtaggcagcataacataaagagagagaaacaaaaagattggaagcttgaggtgtagctaggtgcacatgaggcccattttcaatctgtagttccaaaaacacataaataaataatagataaataaaaccatgatgttcagtaaaattcaagcttctaagtgctggctttaaacttggagctttttggatcatttcccctgagaaaattgctttgccttgaggaaaagttgttagttttgtactttttcttgaaaattgttcagaaataaattggattaggtttattggaggatccccaaggcaaagccaactcagcaaattctgcactaggtggcttttctgcctggacagaggacatcagaaggaggaataacttaactgtttccataaataaagattctcaagctgaaatgtgtcaatgttcagagaagggggtatgtgtccttgcctttttcatctgtccaatgggtatttaagtgtttaaattctttgtttccactctgtttcttttctgcttcatcacaatgttagttgaatggcctccttaacctgcataaagagtaagtatgccttacagaatcttttagagatagtttttccatttaacacttatttttttaattttatgtgtgtaggtgtttgtctgcatttgtgtgtgtgccatgtatatgcctggtgcctaggaaaacaagtagagggtgtggggttggctggaactggagttattatagtcaattgtgagatgccatgtgggtgctgggaatcaaaccaaagtcctctggaaaatcaaccagtgctcttaaccactgactcatccttccagtcccccacttcacattttcttagttaattaatttttctgagactggttttctatgtgtaacagtcctagctaacctggaagtatctctgtagaccaggctggcctcaaactcacagaactctgcctgcctctgcctcctgagtgctgggattaaagttgtgtgccattaccatctggcatagttaattaatttttatgtagagtcttgttatgtatccctggctatctgtaggttaccgcatagaccatccctgtattccctaggtacataaagaaattaatgcctaagaaattaagatttatggagcacatggacagttccttatcatttttgtatccctagcatctaatagaggctaatagtaagctctgggaaaatgttcaggatcactgagccagctatgcttatggatgctgtagttatgcttatgggaggtgttgtcatgtctgggagagctgagtgaggaatttcaaagaaggccatgattatggactcaatgtggggtattaattactgggtttgggaaccaactctttcatcttatatatgagtggtcatagatatgtcattacttatttccaagctttggcttttgcatctcttaaatgagctataaataatggcagtacatactaaagaagacaattataaggaacaaataaggcaacacacacaaagtacctagcaggtgtctgttgcagagtaattaatgaacattgatcactatctgtcatgcatgcatctctctctctctttctctctctctctctctctctctctctctctctctgtgtgtgtgtgtgtgtgtgtgtgtgtgtgtgtttagtttttgtattttcagttcttcctctcttcagcggctatttaaatagtgtgaactagttgtcactttaaatgagagagggagaaagaaagtgaggaataagggtgatagtgagagacacagagaggaatggatcgagaagttaatggaccaggaagaagggcaaaggacaatgtcagcaaaggaatgaagacttgacttaggttttatctgctggcttctttgatgttcccctttctgtggagctgccttcagtggttaaggacagggtatccttcattcctcacccaatgacacttctactggaatgtccaccatcaaatcatgtgtgatcactgcctgcagcaagcagaagaatgacaaccaaatgacaggttcctattcccaggaacctggggtttctccaagttacatggcaaggagatgtcacctgacttcactgtgtggatttcttcctggattctgtatcttttccatcctctccacttcctttcttagatctccaagtgctgactcccttcttttggtctctggggataaacccttagagaggggagcccaagaaaagccctgacatttgcaggatgaaatgtaaatagatatgagtccatgttacaatcaagcttagaaaatatccaatattgatgaactggtctctcctggtacattctacctcaatggtgacaaggaagcctagattcacatttggcatttcatgatggaatatgttatccctaggagattcagcctgcagttcctcagcctaccctggcatctcttcccaagcatggctttcacctgcaccacaaacagggaagtgagtgtgggtgtggctgtcccagcgtagatgtcatgcatctactccacagccttcaccactgtccagcccttgcccacctctcaagcccgatgggtacatgagttgagtactcttcttgagttgacaaatgttgagactttaaatcttatatgtgcagatgagatactgagtaggcatccatgaagagctggagtctacacatgtgctataaacccttcaagttaaccccaaggagaatcaatctgtgctcagagcattgggactccaggagtgaaaaggtcagagagtgctatcctccctgcaagttccatgacgattaatcttaaactacttgatcagttctgaaacagatgtctgtgtcatgtgaggtgggcctcaaaggcgtcagcacagtttaagaaatcagggaaaatggagaggaagtgactttgcagatttatcttcaaggagctcacattttatttttttattaaatattttactgtatttctacttctagtttaaccaataaattgctatttctggacaatattttttggaacccatcccctttaaagcccaaagctcctcagacatcttcctgcagtaggttttaaatattcacttggtagctctcacttgtccatgcctttcctgtcctggcatgattgctgttaaacgattattgttaaatgaacacactgagaattgtgaagggactggcaagaaactgttaggttttttttttttaaacagattttacgtttatttcttttttcccattatttatttatttatttatttatttatttatttatttatttatttaacataccaaccagtttccctccctcctctcctcctgttccttcccatctccccaacaccccctcctccaacccactcctcttctgtcttcattcagaaggggtaaggtctcctatgggaatcaacaaagcatggcatatcaaattgaggcagggccaatccctgttgcatcaaggctgaacaaggcatctcacaagaaactattttttaaatgaaatatttgaaaagggatctgaggcgccttataaacatagcaccttctgtatgatttctgtggctaacaaagaagataatttataatactttcctcttcaaaaagccaatggccagcaagagtaaaagaaggtaacatgacagagatgtgccaaggatcaacagacagtatttcaaaagcaagatgtgtgctatacatctttttttcccattggagtattattagtagcacttgatttattttttaggacagtttacagaataatgatgtaaggaagcttaaaatatcccattagaaagactggggatatagcttggtgagttgtaagtatccagaatcctgattctgagcctcagctggactctaagcttctagagtgggtgcttggcagctatgtggcagactcaggtactgggagaattctcaagaactcttgcaatcaatgaaatgaaactgtagatttgaggcttgtcttctgtaggcaccaaaccgataaacacagagagaagttttattagtgtatgttgtagaggtcaaatgaaaaattcagaagaaaaatggtaactccatgaagtcctggggtttaaatatgaaaagacatttttttttcattttgtaaaatagtttttttttctaacattttttatttgaattagaaacaggattgttttacatgacaatcccagttcccttctcccacccgtcctcccctaccgcctcccactgccccccccaactaaaaccttatctgtcacatatcctttctgttccccttggatggtaaggccttccataaggtgtcatcggtgtctatcgtatcctttggggtagggcctaggcccacccctgtgtgtcttggctcagggagtattcctctatatagaataggctcccaaagtccacacctatgctagggataaatactggacttctgcaggaggtcacgtagatttctgaggtttcctcacagaaacccatgttcctggggtctggatcagtcccatgctggtatttcagctatcagactagggagcaagagttcccagatgttcaggtcagctgtttctgtgggttttaccagcctggtctggacctttgtgctcttcactggtccttctctgtgtctgggttccagttcagttcagtgattagttatgggtgtctgtttctacttccaccagatgctggatgaaggctataggatggcgtataagtcagtcatcaatctcataatcaggggagggcatttaaggtagccttactactcatcgggaaaaaacaatggaatcttgaaatttgcatgaaaatggatgaatctagaagaaaccattctgatcgaggtaacccaatcgcaaaaagacaaacatggtatgtactcactcatatgcagattttagacatagagtaaggattaccagcctacaatccacactgccagagaagctaataaacaaggaggtccctaagagaaacatacatggttccctgaagaaggggagaggttcaagatctgctgaaaagacattttaaactctgatattttaccaggccacattctgccaaatgtagtcaatgagcctacaaagaaacctacatgggaaaggctgctttaagaatatgttctgcaagtatcaatccttcagagcaggagaaagtttttagacatgtgcttgacagcttgaaggaatttcacagcatctatagcctatcatctaatattcttaatgtagggatggaagaaggaagagactgtggtgcaggtgaattggatgtaaagggagctagttgtacattgtgaagacacagtaattactgttctgtaagtgaacagctctagaaactccaagaaaagaatcatgtgacagagctgtcagtgtcttagttacattttattattgtgaacagacacatatagacaactcatatagaagaaaacggttaattgggacattgtttacagttttggaaggtctattatcgtcttggtgggaaatagggagtcatggtgctggaacagtaactgagacctttacatccagatctgtaggcaggaggcagggacaggggagaagaagagtgaggtgggggagaaacacacacagagagaaactgggcctggcatgggcttttgaaacctcaaaacctatccccagttacccactttctccaacaaggccacacctcctaatctttccagtttttctcaaatagttccacttttgttgactgaacatttaactatataagcccatggtagccatttccactacagtcagtgatggggaaatgacaactgaaaaacatcagccagaactgaggagaaaagagagattacaaggattccttcagtaataattaacatctaagtatctgttgcatgcagcaaaatactgtcatttctttacatgtattaatttctcagagaaaaggcagcaaatttgaatcaccaaatgaaggttgagcacatggattattgctaaacagaacaaagtagcaaaaatttaaaaataaatttggatccaaaattgaaaatacaaaggagttcaaatattcaggacatctctattacaaaacaaaacaaaaacaggacaaaaggaatagcaactgaaatggtatgatctgtaaataccctcacaggtacacatgcaaaaaaatatactatgaaggttctatctttttggttggcagtctgtatcccatacaacaggcaaatatatttacaatagtagaggcaagctgaatttggtggtacaagctactggggaggccaaggaagaatggtcatgagttcaaggccagcttcagaaactgaagtgagattttgtctcaaaattaaaagtttaaaaaaaggatctgggactatgtctcagtgggaaaatgctttcttaccatatatgaggctctctgttcaatcactagcaccctccaaaaactaattaatttaaaaaagaagtcaattaaatcatatgtgtaatttctgtaatgctatccccatttatcttttgaggtttctgactggttagctagcatcaaggtgagaggggcaagaacacgggggctcttttgaaggagattttcctgttctgccccatagagcagcacacaccatttcagtgattctcaaggctcagaattcagttatttcacacaactgaccgcaaagcttgtgagaaatcttgtctcactgcagagacaaaggaaatgaggaaaaagaagaaatgagtcttgtgatcagctaactagtctttttcacagtctacattctggcttccaaacatctgcttcctttcccttctcacttgtagagcactttcataacccacacacataccaagataatgccaaacctcattctgccactgtgtctaaataaaagagtggggtctctccagtgatacacagctgtctgtcaaaatgagataaggtttctcctgggctgtcagactatgaatagaaagagaagttttttcattcttcatgaaccctccacctcatctccagtgttcaatgtctcagtagagaaatgataagcacactgctaagttctaatagaagtacagagggggcagatgacattccccggggccatggcaactggatcttactgagcatgaattgtacatgtttcaaccttagaaggtgagccatctggttgactagaatgcaacctgtggatctattcctttcctgtggtcatatcagaagttcacgtttggtacatccccaccttaaaggactgtctgcctttgtctctctctccatctctctctctctctctctctctctctctctctctctctctctctgcctttattgttttatttttttttatttttaattgctcatattaacaagttatccacagggggccacagccaagctgcttgtgcagacatgagggaagctttatttcttggtctcttcctccttggacagagtcttagcctcagcctggtcagccagaagcttcttgcaggccttatctgccttcagcctgtggatgtgctgcatgagaatccacttgtttttggaaacattctccttgactttcaggtataggctgttctatatatggtggtcagtcttcttagattcatggtatctcctgagaagacagctcaggatctgcatccttctcatccaggtcaccttctcagtcattcgagcagtactcttctgctgccctatacccatgtgcctgcatcaagcccaggaacagacagtcacatgattctggataatcatcccatctttgatcagcttctggatctgcagataggagttggctttggtgatttcattggtcttattggggtccaacctgacctttttaccacagcagaagacactagagtcaagcctgttctgtagcctgagcttactcaaggctgccattaatcacttcttcctactttaatttttgagttcttaatattttctgggaatttaacctggcaattaatttaaaattttagagtttgacaagtgtagtagaatgtgtttctatgctggatttcttatttcttaggtttcttagtgactgaggcaggaggatcatttgagcccaaggagtcgatgactgtcctgaacaacatgatgatcctttgtctcttaaaaaataaaatgtgggaccaagggtggaagtgatgataatgatggtggtggtagtgatagaggtggaggtgatgataagtgtggtgatgatgatgatggaaatcttggtgataatggggatggagatggtgataatgagtggtggcagtgatggtgaggatggagatggtggtgatgatgatggcagcaatgaaggcagaggtggaggtagtgagaggtgtgttgatagtggctgtggtagtgttggtaattatatcagttaatttatatgaattaatttgtggcataaatattttaatatacccttcacattctcaatcactaagaaatgtcaaggaaaagatcacactgcacaattattttgagcacagtttaagatataatccccagttctgaaaattaagtatcccaacagtaaatattccattttctgaggctgaggaaatgactctgggtttgaagtgattgctgtgcaagcaagagaaccagagtttgatcacagaacccacataaaagccaggtgggtatgccttcccgcctgtacttacagcctcagaaagcagtgccaagaatcacaatataatcaaatctcccttggaggcatttttgtatttttgtaggcacacaagcgcacgtatgaatgtgcatgcatgtgtgagaaggcatgagtttgaggttggattctttctcagttgcccttctgtgttatcttttgagattgagtctctcattcataaccagagctcaatggtaaggctacattgtctagggttcttctttaatgatacgtctttactctatccacctgagccctgctgtcacgtgggcacccagaataacacacagagtcttataatagtttacaatgctgctggcaaactgactaggatttcttatgtgctagctcagtcttaattatcataaatctatatattttataagacttatagaggacaccttctgctggtgtcctcttcctgggatcacatggcagctctgtagcagagagcaggaagaggagggagagaaagaggacgatttccttcttgtccctgcttatattctaagtctgcctgctatgtcacttcctgcctggatatctttactacatttcccagaattccccttgactcatagtcccacctatcttgctttcctactagccaacagtactttatttatcaaccaataagacaaacatatgcacagaaggacattctccatcatctcctcttttctgtctaaataaaaagaagggtaacttatcttttataataattgaagaaaactataaccataactatctgtcttcaactccatcaaagaccacagaaggataatatataaactctagaattgacagagacctctcactacctggccagtcacacccagagttcctctgtaatgacacctccttccaatctgcagtctctactttgaggctgtaattacacattggctattgatgtagccagtttttaaccaggttctatggatgcaagctccaatcctctactttaactgctactacattaactgctgagccatcttatcagcccatccttctctcatattttaacataacatctagcctcgaagttctgtaataaactcaaacatttcccctgaaccatgtctccttgctcccaatatgaatgcacattggtacttactggaaccctctattctgccacctaactaggatattaccccctgatggcagtcattcaccagaaagagacaaagcctttcctcagtttatctgtgacaaggccccctctcattccttatattaaagaatgagcaatttttataatcccacctcagtggtactttctctcttgaaagaaagtctcctctgccaggattccctattaatgtaaggtgcaagaagaatttgtgggttaaaggaaagatgaagacatatgccctaagatcttaaatgaatgtagttcctacttgttaaaccatttgctgttagtaatgtcagctgagcatcattgtcctgggcttagttatttatttggtctatttggtctatttaaacatattcacctggctatctcatttctccatatggcttcagttagtatggaaaatttgaggacattggaacctctttaggtcctccatgcatgacatagtatcagacatctataaacaagtgttaattataaaactacttgtcatctgttatgtaaccaacatagctttacagtaaaaagcataatcctattcagcatttaaaaaataaccaatatttcccttggaaggtatgcatgtaattgtgtcttaactctgtcatcaggtggatcttgtcacctctaatttacaggaggaacaagggcttcagggcctcctcttctgtccttccttttattcttcttggtttattaaactttggggacctgaggagagattgctctgtgacacttgatggttctctggcaacagtaatagaagttcaagaaaggtctggagatgcctctccccattcagacaacagcttggcatttcaaggcatgtgggaaaacaggaacttggggctgcagagtatttttgagaaacgggaaagaatgtttaaaaatactatgtttgtagctcaaggcaataaataacacaactatctctgtttaccttaacttttttcttgcatcccttggctttctccttctttaaagagtgtagtgatgcattcctgtttgctcataaataccagatgtgtggtgaagtaggtcatgagcttgtatgtggatatcttgtgttaagtctccaaagtgcttctttatgaagggactttcctggtcaaatcacagtgggtgtgctctgctgtgtcttctgttggcagcacactgtacattatcgtttttaacatttgataagtcctgtggtggtggtggtgcacacctgtaatctgaggttttggaagctgagacaggaggattgcaagtctaaagccaacttttaccacatagtgaggcttagtctcaataataataataataataataataataataataaaataaaaattttaagccagtaactctgactatatttggcaataaacttcagtcctttccttcataggcaattccaattcccttatacttagaaagtacttagaaactgtgcaatctaaattgaaaaaccccaaaggcttggacaagtaagcttaaggaatatgagatgcatgaaactatacacatctgttgaccttattttggcaaagacatttaaaaaaaccttatctgctatcactgtaatctactaaaatgaagtatagattatcaccaaacaataatacattcaaagggcagtaaagctaggatttgtgttaatcttacttcattttggaacaatgagcaatccatatgaacatgtacacatcctgtctattgcttctggaccctctctccccctttcctttgatataacaaccttaacttttctctaagaaaaattattgcaatttggtccatagggtagaattatggggaacgggtgttccatgtattcctcggccaaggagtagggtgtcatacaagcttcccaggtaagacttccattccttgatcataacctggaactgtcagctctcatcttttctactatatatggggatttctgagggagtgatatgttgaatggttactttggtgtgtgatcagtggctccacaggggaagcagactgtgatcagagttgggggtttcagagagcagatgagaaagaattaagttttcaaactcttttagtgacagagccatttgttgatgtgggtggaaaaaaattatggaatgaggacactctatgttctcagttttggattgaattatgggatgagaagttaagctatctatgttgatgggcacatggaagtggattgtgtgtgtgtgtgtgtgtgtgtgtgtgtgtgtgtgtgtgtgtgtgtggacactccttgatatcaatgcacattgataccagaattccccagggatacttcagtgatcatctatttccttatacaagactggagcatttaaccaggaagatgtggtgtacaccgttagtcccagaactctggaggcagaagtaggaaaatctctgtgagtttgagctcaacctggtctacagagtgagtaccaagacagccaaggctattacatagagaaaccctgtctcaaaaaaaaaacctgtggcatttatgtttatttatacccttcttcatgggtatgataaaatagctctaaattacttgtaatgcttaatacaatgtaagtgccatgtaaatgcttatacactttatcactttacacggtaagagaaaaaaatctatatactctatatatttagggcagaatcagatttgtttcagaatattttctatctattgatcattgactccaagcaagaatctttggtatagaaggttgaatgtgtatatctatatatgtttctttctgtttgtccaaatgtctatccattcatctatccatccatccatccatccatccatccatccatccatcatctatctatttaagctatgcccacttgttgtttctcagtaaactgtgtttcatttaaaagcaacaaggaaacaccttcaggctcacagtcaacagtcttgtcataaaacaatgttattcctttaaatgaattactaaacattagtgaggacatggtagcctaaaaaaaggcattctctatcctcagtataagggtttaattaaataatgttgggcaaatataaaagctagatagctgtaccacatatcatttgagaaatcctgcaggagaaaactgtccaattgtcattaccgtaatgtgtatatttgtgtctgtccatttcatatattgtgccaacatattacatttaaaatgggaagtaacactacaaagaaatgtaataagcagagaaatgaaatatgttgaggctaaagcagtctttttggaagctagtatttatactaaagctggtgtgcatatttctgtaccaggactatgaaatcccagaatttagggacaggctgtcaataagagtatgctatcccctttagaagacattattcaatttgccagtaaatagatgagcatgctgggaaagttggcagtagataagaccctgagaagtaaggtaattgaataatcatgacatttatccttgttcagatgttgtaacattcatcttggaggcttaaaatattgaatttgtgattttttctgtatgtcatttctctcagaatattctgctcatgtggctactacaagttcttcagcacgtgtattaattcacgtctatcatgtttgacctgccaccaaaggtcatcttcacccagaattcaaagctccaactcagatttttctttaaattataaaagccacagtgttttggttatattttgaaagactaaatgtaattacacaaatctttttttttcaattcacagaggagcagggaaaataaatattggtttctatgcctgaagctgaaagaaaattggggacagtatattttgctgggttgtcacttttctcccacagtaatttttgtgtcaagaaatagtttgatttataccatccagtaggatctatctcccctctctctttctgcttctctcccacctctctcttcctgccttcctatctccctccactccccttctctttaaattttagcatccttaacctctaccccttagaaggttggtctctagaattcttctactttaactgttctctctttcatcttttcctccattccccactcctaggacaaatctcttaccaaggtcagattagctgatttctttgtcagccgtggtcaacccttttcctggaatgggcatccaccctctttccattcaacttcccttcaatgctttgtggtgcctctcacactgcttttacaaatggcctcatatgactatgctccgcctcaatatcccagagtgagaagaattcttcccattctctgacatcatttcctattgattttatgtaggcacagattagaaatgtctgtctttgtgtttagcataagtgctaacagaacatagccttgtctgtttgctttatgttagcattctaatatccagagtagttcctgacagaaagaaggcatttgatagaaacttactcaagacagaagactcttgatggacatttacttttagtaagtctatgaaaaacatttctctaagccctatcccaaagaataagacagactttaaagaccccctatggaaggcctcaccctcccttgggagcagaatgggtatggtataggtagggtgttagttgcaggggcggggagggggctggggcaggggaagaaggggggaagggacctgggattgacacgtaaaataattttctttctaattaaaataaagaaatcaagaataaatattttacatttctaatatcaatccatattcctaagtactgtcatcatatcacactctattgaaaaccaaggaaacaaaatgtattgtgagactatgttgcatgctgctcatccagaactgtattcatcttcttagaaacagagactaaagaagtaatagttccgtcaaacatttacagattacactgagcacttggagggttacagagtgtatactcacagagacaggccaacaatgtttttttttttttttttttagaacagctatgcttagaatgattagttactgtgtaccacttgcacaatggctgcataaggaatgtaaataatttagaatgtattttacatgagggatcccatcatgttagtattgtttagtttgagcagcagcctgccttcatttccagaaaatttagtgtactattaatcatattataatactgattttgtgaaatagccgcttgttgtttgagcacttagattctacattcctccagtgcctaggacaggtaagtgaattctttaggaatgatactgaccccttaacctgcttactactgggactcttggaatctattccagggcctcacacattctaagcaagagctctgtctttgaatcttaaacctatagtcctgatacttttgttcatattaccaactattatatcttccactaaggaatagtcctgtagaatcctccactcttgtacatgattcttctctttggatctccaggcataggcagagggaactcccacctaagccatacccacagccctgatagatatgttcttattataaaccatggtcctgtccattccatgagggaattctctatttctgtgcatactacattgataacttacagattttcaataacataaacatggaaatatttgtgggcatggtggcaaaaacctgtaaaccaatcctaggtgtgatgaagtgagaagactgtgagtctgggcacagcctgggctacagagggagaccaatgggaacctgttccatatctcagccccccacctctatgactttggccaagctagggaattctgattcttttactttgatcttgatctgaagataatgatggcctctaaaggattgctgtgaagtttaaggtgataatgacattctctcccctcagatcactctcaagcatgtggtaaacacacaacctagcttgggtagaaatgtcccattcctgtaactacatcagtgccaaattctacagataccattacaatggccatggctgttactaccagccattggccttcagtgttttcttcaatgtcttgtgtttgtactgtttaaaagcttctcttatctaaagctacacatggaagaatggcttccaaaagcctatctgagaaaggcttaacctgcctgggatgtagtataccttttaagagtcaggtcttgggatgaagcctggccattgtgattacaaacttaaatctgataacataatgcttggtccctttttgtgtctagtctcttgttgtcgtggagtgagtagcttcccccatcatgtgccccgacatagtatactgattgcacagcacatgcccaagggtaatggtacctactggccatgaattaaaatatctcaaactatgagttgcaataaactattgcttctttaaagttgtttatctctagtatattgttttagccactgaaatttgaccaacacaactagtattctcagttattacttgttgactcatgatgctatattatgtggtctaaaatacctcactttctgtaaatggaaatttgccttctctaccagggtgccatttactccttctgaaggtattttaagatttcctctttacagaggctgaaaccaattggccccagtgcaaatttcccaggaacccaacaccatgaaagctgtttaggcacttgagagttactcaaatcagtagctctcaataggaatttcccaaaattaaaatggagagaaatttgcattccaatttgcaatcagcaatctctttgacttaactctagttcttgatcaaggggtgagactatcacatttgcctttctaatatggtcacaataaaaaacaagcctaaattatccctttaaaactaataataagcatttcaaatcggtgagcttcaaggtctttctgaacatccacacatggccctcttccattcctttgttcacgctatacatgtgttactgtccatgactgcccttagctttctgccctctaattttgctgtctgcttaattaatatatttaaacctatctaatgacatttatattttatttgtttgcctttaaaatgtacaattcttatttttgtggcaataacaacagaataaggaatagaatagaatagaatagaatagaatagaatagaatatttttcaggaatgtcactatcatactaacccatcattcttccaacatgtgagccttgtgcaagccctatgcttctattcagccacagggaaatggtaaatgcaaacccctctttctttgtgatttctcaaggtagcaggattactaaggggtactatttgactccaaccaggtgtgcttgccatatgccgtgtttgtcttcttctccacagccatagcttttgtgcacctcctgctatgacctggttttcatgtgcctctgcccagacctgagaatataccatttcctaccacaatgatgttggggactagagagagagatgccttgtggttaagagccggtactgctgttttacagaggacttgagtttagttctcagtggcatgctggatgactcacaataataagtaactccatgtccatggggatgctacactcctaggctctgtagacacctgtattcatgtgcacatatcccccacacataatttaaaatatataaatcttcaaaatgcagataggtcttctaaagccagactgtcctagctctaccagccatgtgaccttgaggaaattatttgtcttctggaactctcatcttctcttctttaagacaactatttaaaaatcactatcaaagcaaatgtgccaaggtgaagaaacaagtatgatgctattcaaggcagttgcagtgaagagaaactcaaatgtggtcaaaactcagcttcactgagatagaaggtggagagctttaacagctggggtggggacataaagggccagctatgcttgactattggctgtacctgataagaatgaatttcccaagtctttgtgatgggcagtggttttgaactttgaaacaagtgttctaagcatgtgcataccattccatagggaccaggagatggtagtccctcagtggatttttcacagtgatggccctgccttagagaaagaccactgtgaattgcaaaataggttaagaggttttaaaaaaaaaacaagtcaaaggagtagagatagactttataggtttctaaagacagcagaggacagggggctaccatctggaagtgtgacagggacttcagtgagaggtggtcatctagaagtacttggaaagaagccaacagacaggaaagtggaatattggttgattggagagagaagggtctcctgggagtgaaagcaatgattgaccgtgggggtccccgacagaaggcatcagggacccgagacagacaaaaagcaggtgctgatgaagagtcaaatagagatcttggggatccaggatatgaatttacagaaggagggcagcagagaaggcagaagttacattctgatgcagatatgagaagtaccagctacagagagaaaaaggccaaaaccaaagactttattagagtagacaaaagctcccattaaagtgctgagaggcaccccagagccggagtgctgcttggctttttatgggcttctggggaccctccctccagattctctctccttgatgattgattggtcctgcctggggtattcttccttggataggcttttcaccctgcaagctattagcaggggacattgacatgtgagtcttctaagtttctgctttctaagacttatagttttggtttacttcccgagttttataagctctcattcatcatggaatatatttcagttcccagggaattgctgcacactacaactaccactgttaccaccaccaccaccaccaccatcaccaccacgaccaccaccattaatagcacctatgagtcagcgaatatccagtttttatcatgagactcaataagctttttggataaagccttctttctgccaatactgtacagaatgccacagctaagcaccaaatagggatgagctagctggatgaacactgtgggtgtgctcagaagcaaacccaagacattgtctgagaaacgtctccagacattttaaaactaactacatccttgcaaagtaaaacagtaaggtaattttaaaagcaactttctttttgtttgtttatttaaaacagaatgcaagattatttctttgctcccctctacccagtccttcatatcaccccagcaagtgtattgaaccactgataataaaacagcaagcctgcttatcacgggagaatcagggctctcaagcagctgccatcctgttacagaggagagctaagagcaaattgctcatgggtagtgatgtaagcaaaagccgcttctttggttccacacactgaagcaaaggaaagccataggaaactgcacagctctgttgacagcagcaatggggcactctagcagcactggcagtctgtcagcatttctaattacactgtaaacgttaactctattaccctctgtcttcattccccatttgcaacataacagccatcttgcttgtttcctctctgctcacagaaatgatccaaaattgcctctgtagataaaatattgtaatctatttgagagaaaatactgtttgtacaattcagatgatattttctcaactatataactctggaatttattataatgtacaaaacacttctctttgttcttcaaggaaaagtagaattttataattttttaacatttatgttttgtctaaactgaaaggctagtcagtctaatagctaatctagctacaatgaatttataggatttagtggtattgcatggcagcaggggagctggggtatgggtactggacctatttgtccatgtcttaaccctgtagaactggtgactggggaatggggctttacagatagaatgaaattaacgacttcaatgaaaccctcctgggttatatgaatggaccatgtattcagtgaagagaaatgtctttagaggagattaaggatgcagaataaatggaaggctgtgtgaagactaaggccaacttgagttctactgcctgtgaaaaacactgacagctgataaaacccggatgaggctggagtaataagtatgcatgctcctgccaggtccttccttttagactcctgttctccagaactgtgagggaatatatcctaatttcttcatgccaatcaatgttccctaggaaatgaatttatgcatgttgtgttgattagctagaccacagccctggagacagcagtgatgagactaacctgtgaagcagctagctgacacattaggaaataaaatatgtttaactataaacatgtttatagtcctctaagtcaaatgagtaaatcaacaattagtttgttaaaattgagccacacattgagtttccttatacttgtttcttcaccaaacttttatgtctttcttccatcttcattgtaggtctgactaagagcagtgaacagtaatcgtgcctcagctgatctcaaaatttccttccccagaaaatttagttcagtatttttggattcagcctctccatttgtcaggatatggacagaatacagcctagttatttgacagaatatgcaggaatgacatccaatccaatttccagtaaagttctttgtttccctcaaaaataccatgagtggaggtgccactgtctgcattttctcaaattccgtgtcagtccaaatccacataaatttccacataaatttcctggagctcatttatttattctgttgttgttgagtgtgtgtgtgtgtgtgtgtgtgtgtgtgtgtgtgtgtgtgtgtgtgtgtgtgtgtaaattttgctgggcaatttatgcatgttagctaacacatttttggaaaagaagcttttgatgtgtgcgttttaatttaatttgtgcatcttgccctcttgggaggaaagaataaaaaatcctaattttcagttttattcttggcatattacacatatccttatttctttctctctattgaacctgtcagggagtgatcagcccagagcaaggatcttactccagtgggacattctcctgatgtgcccgaatcgctgactttgggggttctccatgtataagtccagcaatatttaactagaaataagaattcataaaaaatctcaattatttgactctctgaccaatacccagatggtgggctggtgttgttatctggttttcattctaagaacctacagggtggtcactccaaaatgaggtttttctttctgcatttcagcacagaaatcccaagtccagtccatgtttttctcattgtttatcatcatcatatttgtcatcattgtgactataggtattgttattttcctttttctctcactggtcacactgaaaaacttgtctctgatatggcatttttcatgaataagaaaatattcccttgtttcagctctctcacccttaaacacaccctgtcatgtcttctataatctctttgtccttagagtctaccagaattttattaattctgtgccactttcaatattcctatttctctaaaacttctatcaggatcctgccttcaggctttggagtttcttattattagcctggaatcttctggcccagatattcatataatttattcaactgtttttctcttcatatttgcaaatcaagtcttattttggcagtaacttgtgagttttttttaaacagaaatcacaatgatctgacatatctatgcttactgtttactcatcccaaacaaaatatagtaagggtttgtcttaccgacatcttctcagctcttaggatacaatgatcatttaaagttgagctaaaggaaagatggaataagtatgctaatctcacacaatatgagaaaaggcatatataataaggagggctattgaattaccataagctggtcttcctccaggaggagacagcaaacattaacctacatgcacctggaagagagtgttatagcacagaagaataaaaggtgtcccatccctgtgacacctgctctcctttgatatcacctgtgttccaccagtcccctttccttaaggcatgcccacccacaatagcccatatttagtctttggctctgagacacttcagttaatcactgaactctaaagatttgtttaggatccaaatatgagagagcacatgcagagtgtccttctgggtctggcttacttcactcagtgaaattcttttccagttccatttatttatttgaaaacttcataattttatttcaccatgcttttaattgctacagaccaagatttaaaatagatttgttatctaagacaatcatatttctttgattcttttatatcaattgatctttatacctcattcatactaattctagacactctgaaaaatgtgctttacattctaagttgcatccagcttcaaagtgtgttgagaggttaacttttaatactatgaaaacttactccttttaaaaattaccaggtgtataacaacattccagaaaaaaaaattcccagatgttccttttgaaaataaattcttttttgtagatgcatatgaatgtgatatatgtgtgtggtatgtggatctgtgtgcctgcaatatgctttccagagatgaagggaaaatgtcaggtgtcctcctcggtcactctgtgctattctttcgagacagtgtcttagttgaacctggagctcagttgcctggcaactagcaagccatagtcattcttcttcacctcgctcagcattggggctacaagtgtattaccagccttacccagattttgtgtgggtgctgagatcggatcccaagctcccactctgtgcatattctcacacactgagccatctctccagcaaatacaaagtaaattctttacttaaaaatgcaattataaaaacataatcacacataaatccacaacaaggttcctttaaatggttattttagtgtgcataaaatgtgacttttttcatattccaaaacaacaacaaaccaaaaaaaccctatattctgctcttcaggaatatagtaatccctcagtgtaaagcctatttatatgcataaggcagattcacatattcattttattaagaaaatctgactccaggcttcacctctttcctgatggaaatggagcagaagctgaaaggaagctataatttttacggcttgttttgtctgtcaagatccattctttctcgaatgtgtttcaacccacctatacagctatatttatgctctatgatctcaattttctcccctatttttattgaagaataaaggtaccccatccaagttgagaatcagaaactatggaagcacagtttcatcctcaaacttctggctggcttcagttccagagatatgagcccaggggccgtgagctttcagtccacttcattgtttaggaaaaatggcaaaggccagtgagcccctggtccatccttgacttcctgttagtaggactggtctttgtgggcccaatgaaggcaactacagttgatgccttttaatgatttgtagacagaggtttctgtccttccctgtcccacagccattcagtccaaaataaaaacacagaagcttgtattaattataaacttttgacctatggctcaggcttcttattggctagctctctcttgattattaacccatttctattaatctatatgtttccacatagttttggcttaccagtgatacctgagcctcttgcttccttggtagctacatggtatctcccttggatctcactgtctgtgctcctcttcctggaattctcctagtcttgtagcaccacctataattcctgccaggctacatcctgcctgtccattgaccaaaacagctttattcatcaaccaataagagaaacatatattcacagcatacgggaatggcatctcttcaccttttacctaatctttcagctcttgcatatttcctgtttccacttctgcagtgttccatgaaccttagagagagtggtgtaagtgacttttatgggacccctatctgtcacctgttttctgcattttggtcagtcacgagtacatctgctactcttccctggaaggagaggcttctccaataagactggaagatcattttgactgatgttttttctctatttagcatggtcttatctgtaggattgtggcacagtacctttattaaactgaggtatgtgtcctgtattctgacattctccaggactttcatcatgagggattgttggattttgttcaaggccttttctgcatctaatgagataaatgttcatgtggtttctatctgagtttgttttttgtgttggatcacctttaataattatgcatgttgaaatatcccaacatctttgagatgaaactgctttgatcatggtggatgttgttcctgaattcagtttggaaatattttggtgagaaattttgaatctgtgtttcaccaaagagattggcctataattttctcctttttgttgtgtctttgtcacatttagtatcaaagtaatactggcttagtaaaaagaatttggaggtgttccttttctattttacagaataacatgaggagggttggcattagcttttctttggagagctggtataattctctactgaatgtgtcttggaaaaggatacatttccaggggagaaatgagtcagaaccgtgggaaggtttagaagcagacatgacaaaggctatacaagatatggagctcgtaggtcacattttgtgggctcatatgtggatgtgggtttgcctttgtatgcatgtgtgaaggccatgggttgacatcaggtgtctccctttatcacactttgccgaattgtttttttagaagtcattgagcctgaagcttacttatatttcaattagactgtctagccagtgagcctttaggtcggcctactccatcacctgttgctggagttgcaggtatatactactgtaatatgattaataaagacccagagacagatattggggttcaagctgaagatcagagaagcaaagcaactggctactctctccacctcagctgaaaagggctgtcctgtgctcagcatggctggagaataaatctctgagactgaatactgaatgccctgcttctatcttatatacctctctagagctgggattaaaggattgagatcccaagtgctgagatcttctttgtgtgagctctttctcttttagactgattcactcagatgtaaccctgagtgtccttgaagtcacagagattcatctatctttgtctcctgaatcttgggattaaaggtgtgtgccaccactgcccagcttctatagctaacaagtgtgcctggttgaactaaaggtatgttgtaccaccattgcctggctctatggctatggctagctttgcattttgatctccagtggctttattaaatcatgaacaatacatcaccacatactgccaccactggctttttcatgagtgctgcaggtccaaaatcaggtcctcatgcttcctcactgagccatctatgcaacttctcttaaactttttgcttattttgcataatgtggactttgtcgattatgcttgtctattatatacagttctacaaacaacttcattcatctctagtctcattatatcatacctctctaccaggggtcatgggttttagaactataatgaggcatatgttaccttgagatacagtgcagtgcctctgtacctgggccaaagcttatgcttgttctagttggctttgactggggagtttcctctttgccaataggttttctcaagatactaattttgcagccctggtctaaggcttctgggatcacattctcctcacttctagccctactgccctacctttgtgctctaggctggcctgggaactactgtgtagtccttaacagcctcaatcttgccagcaagaccccttcagcctccagatttctggaactgcagaagtggaccaggactcctggcttcttttttactatcctagtattctatgggaaattctagttgaatttcttaaaagcactttgattgtgttatttgtctgctgaaaacaatgtgccttatttgtaaggaaaaaagttcaaattatttttagcctaaaattctaaatttgtcaaatatgtatgtctttccctgaatttcaaattcctttcctagcaatcaatatgcaaacagagaacaacaaatgggatctagtgttttctgttgtttaatatgttaggtcctttagcatctacatttctctccttttcataaatataatgcagtctttataatctatcagagacttcctcacttcatgttaggaggtggaggcctgctttatttagttgatatgaattgttcattgtaaacaggggctcaggttcaaatagtcagagatgaacttgagagtctacattgagtcttttaagcacttgctcacacaactttaaagtactgtggcccagactccaataaaggatcccaggcatttcaatgaagggctgaggtggctgctgtctgtacccatagttatcttgtacccatgaatcttaaggctcttgaaaacaaggagcctgcatgcaatcagaaagaataacactatacgaagtcacaggggcctaaagcctcaaggaatgctaatgacacaaagacattgttgacttggcttgatataactacaaggacaagttaaggacaatcagaaatggggaagggggatccttctggaaagttgtactcatgccttggcaagatttgtatatgacatttagtaaacttaatgactaaagcattaaaatcaatgaaagcatgatatatataagaaatcataaatcatatttaattatttgccatcttgcacattggctcattagagaaatgtattctcagtgctgttttagtactctgtctgtggatgaagcttcgctgctagttgtaatgatttactgaaatgagaacccaaagtggagagttcttaaagttatcatgtataaacaaaaggttcatatctatttgtgttttctttttctagggtcagacattgttcagtggttaataaagaacttaactatagaggatccaggtaaataaatcattttcctcttgctatattattgttttctttatggttttgatcaacgttctcaaggctattgaaaataataatcaaacaaatttcatgacagtaaacataattaaacttgaactatatgtttagtgtttacacaaagttaacatacattcaactaaaactaaatatatttgtataattttcacataaataatgatccattttatattatttagttatggttatttgtgattttagaatatatgtatataattgcacatgtaatttgtagcaaattattgtgaattcatgaaatatctctttagaactctttaaagtaaatctcaattaatcatttacctaagttctatttttcaatgagatttgaatatcatatgccttttataattctgattttggtcatgtgtgtgtgtgcttgatattctcactgaaatcctgaactcatttactttggtagacagtgttagttctatgactgagcactgagttcctaagttggaaacaacttttaccagcttgtattttgtgtctcatggaggaaactcttacacgtacggggcattcaatgacttttgagaatgtcatgtgaaagccttcatgtgtggccaagtatttatgtcactgaaatacaaataagctctgctgcttagtggagatcctgagaatctaatagcttttaaggggtggaaattccagcaacagggaaggatagacatgatggagaacagtgtgtgcagcacactgacctacctgtacaacactctactccctggaaagtgacgtttatgccttctgttctccctctgctgattacaaccctagagtgatttaaacttgatagtatatggagataaaaggggtttgctttttgtgatagtttcatgaaaccaccccatcagaaaatgtagcttgaattctgtatatatcaatttatatatgcccgtgctcagtggatacatgagctttgaaaatattactccagtaggttcagggggactaaaagtgttaagtaaagaatgaagcagctattgtacagcactgcattgtcactaagtgagaggggggtacttatgatgaaggggagccacacctttaaagttcacggttcagctttctgccatgggtatttctgatttgcataactatagcagttcagaaaatggttccaaatgtgctactgatttgcaacaaacaataacaataatatagatcaaagcattaaaaatgaattcaaaggagtattttttccataacaatttggtcatttctccttttaaattttcagagtggaatccatcctgtagcccacggtgtcctgaaaattatcacgcagtccaagcttttcagttatgttataacacactaaaaaagatggtttttatctcgttggtttatttctttgaatgaacaagtttaccctatctagcctctctgctaggttttaagaaacgtaaaagaagccctagtgagggttctgcatgtgtaacattgcacacacagtctgctctcaactaaatgtggctagcaatgtagttgacattaagagagccactttgatggccctgtgaatggggctttttagaatggagactatgttgttaccacaatgtctggtctactttggacctcaccaatatcctgaatcagtttaagaatgagagagtctaatgcctggttcctgcctgtctagtgtcctatctggtagcaaaatgttgtttgatggccttaatgggcaatttggacttctaaatgtcagtaattcgttgaaagaaagttttatgaaaaccagatgaaaaataagaccaagtatggatccaatgacccatgtggagcaaagtgagtttcctgatcttcagggcttggccaagaccaaggggcacatgttgttcacattaatatttaacattgtgttaaccaatgcctaagtacctttcacgtccattacagcaatgtggtgtcatcagacactgagcaacaatgtactgttccttttacaataaagttccatcatcttttagttacaatttaacattattctcacttatatagcataagtgatatatatatatatatatatatatatatatatgtatatatatacatatatatatatatatacacactcattgtatacacatatacaatgttatacttagttacttttgtattgctgtaaagagacaccatgaccaagacaacatataaaaaatatttaattggagcttgtttacagttgcagaggtttaatccatgaccacaatagtggggaacacggcagcacacaggcgggtatggccctgccccagtagctggaagcttacatcttatctgcaagttagaaggacagagaatttttactggagctggcatgggttttttaaacctcaaagcccacatccagtgatacacctctttcaacaaagccatgtctcctaatctttcccaaaacagttccatcaattagaaaccagttgttgaaatatatgagcctatgggggtggggcactcctgtaaacacctctacacaaccatccaggatttgtctaatctgggtttcttctatactccaatctacttttataatgtcactgttggatataaatgagagtattacaagaaggtctgtttctttgacttattcatacttttgttcatttaaaaaatattttgaattctcactgaatgctctgggaaaacttttcctcccttgacgagtgaggagcattctgctcctcctcctgccttttcactggtttggtctcggtctctcaatgccttttaacactttagctaatctgtaattttgacctgtgcagattgcttctcatccatgcagcacactgttgctaagtaacataaacccaagaattcccaaaagtgtattgtctatggcactcttgatgacatctccatgttctgtactttgcttggggtgggggtgggaggggtaaactcaacacaactcaacaccaagctgagacttacttttgctcctgtctcctgtgttcgcctgctcagatgtagagttaagtatgtgttgttacatgtatacatgaggtctatacaacgactaatctgggaaaagggaacaaaacaaataaaaacaaatagcaacaataaattataagttaataaaaaaaacctgcctgatctcagtctcctctgagattttagtgcctgttattggtgtttctatttggtggcccattcattgcttccttatggttaaatctcctcattatcagagttccttcctatgtactgacaactgtactttggccaggctttgtatgggagcatagcaaaagacctgtctgccataagaaatccatcctaaaatctatccctaaaatcaatcctgtttccttttctgttttatcctcagttgaaagacattcttctactttcttaccacttcttggtccagggttctctgacactttccatcgaggacagcccacatagttcttacattatcagccttctgggtcaccagatatctcgtggaaaacagcatattcttctcttatcttaaatataataatttttgtttgttttttaattgtctaagattattctttgatgtgaattcatttttttttgctctctgataaaccaaactctatgataaactcacttagaccttcaaagtaagcacacaatccacttaacccatgattctgactcccatggtcatctccagtggcctgagtcagcttgattgctttttgctttgctctgtgaaatactatagccagttggtaaggcatgaactcagatttttgtcatggaaaatttgctagtctgcattctaggtgcttcttcttctcacacccttcagccctctcatctcattctcaggattcacacactgtaaattcttgctcttggtacattcactatgatctcattcatgaaggcgaacactattgaatccagaaatccacattttgcacttgctcttccctctgtagtagatagcacaatatgttttggctaggttttcaagagctatttcccacatctgtggcaagcttattgcatgccaccaatgattccttgatatcattctgcttgtttgctatctcagtggcctctcactggagacttatgaagctatactgacaaaaaagaagagtctgagaaactaggctctcaaagggcttctctatacttaccatatcaagatgtgctctgtatttctgtgtcccttaagtggcacctaactgctcctctgtctcctagctctacacaatctatcccatgccgcttgagattcttgtcttccttgtgagatctctgacatagaccatgttcctatgttttgcataaggggagttgtgattcatgtgctagctggtcaatggcattgagtgaattaatgtctctaattgccctcctatcttaaaaaatgctttagtgctgtgctttttgaagcttacatgagtcagtgtggaagcaggccagaaaatgattttatttttaaattgcactgatttgttttaactttctgcaaagacatttatgtgaattgagttctttttgttttttaatacataccattttacacttgcctttaaacacaaacaatgccatgaaatcttcagttcccattggctattctgttggccatgaactttaggaatattgccagttgatactactccatctgtctgttggtttctggggttaactttctcttttatattgtttcacatgtattgctcttaccatttcatttgaaaaaaaaaaacatagtggaagtcatacattttctctgctaaactgaagtgttagagtagattagtttttaacaatcaactgattttgttagcaatgggagttggcttgagtattatgaagtatatttccaagtatattgcaccaatgcttcaggccttgatcttctaaataaaacaggagactctggaattaagaaacactaagcttgtcaactaactaagcctggtgcttttatacaaagcatgaaatgaaggcaggaaataagatgaggtaaaaatataaaattatccaaaatgtaaacttaatttgaaatatccacaaaacatctcagggcacctaaatggcttcgtggataaaggatcttgatgtcaagcttcatgatatgagtttgaccccccaggttccacacattagaaaaagagaactcctataagttgtcctctgacctccagagatgtattgagacactccccacaaacatgaataaataaacaaacaactataataaaaaggtcttttggagttatcttttatgaagctacaatgagaaagtcaatatttaaaagtcaaccagaagtttaaattgtgcattagtagccggtttagtgactagattgtcactgaatgaattgaatctacccatcctaggaaacattatagaatcgatcatctgcatcccgaagccagctgcagtcctctgaagaaagcactctaaatcctgttagtccacttaatccattatcaatggcctctgtattctctttacctaatggatctagttagaatgcaattggtatcaaagcccttggaacctgggcaaatgggtgtctggaaagaagattatgtctctgtttccttggtgacattttgggtttgtattttatgcacttccgaaccatttaactaagttatttcttttgatgactacaacagtattatgtgggagtagtcaagatattctgtgattttactgttggaaaaccaacagaggaaattgagaagctcaatgtttcctaaaagcctgaagtagaacctcagttttgtagtctatttgctctatgcatcttcaccttgctgaacagttatttccaatcatattttacttttccatgaatggtgactaccatgatagacaaaggcaatgaccccacctgatggggtgacatacaatacggtgggttttttgaaatattaacttgatattgttggacttgacaaaatacttacagccacatcctgtctgtgcacacaccattattagaggcattttctgtgcatcattattcctatgctttacagtaaataaaaaagaaatcttttcaacaatatccaaaataattcaaatgataatcttgcatggtagaagcatttaaaacaccttgcaaataaccacccaacgctcatgagctcataaaaatacctttgtgtttattctgccagctatcactccaatttgcaataaattaaagtgacccatttactcctgttctggtcctggcaaatcattgcatggaaacattctgggtcttgtaaggtatcatttgacactggtgcaagatatcctgggttaaaaccttcacatatacctctaacaacattgcttgaactagtttcaagacaatatgcattacccacaggtccctcttgaaaaggtgcattgtatgttatgaataatgcttcaagaaatagaagcttaccgatgttcttatattttgaataactgcttgtgtttattacttctcctgttactatgataaaataccctgaaaaagcacttcaggaaggaaggttttgttttagtgaacaacatgttcaatgtacagtctgtcactgtggaaaagtgaaggcaacaggaacgtgacccagttggtcccattgcatccatagtcaggaagaaaggagagcatgatcctccttctcagttagtttctgtctttttctgcattttaggacctaaacccaaagaatagtggctgtaggatgggtcttctcacctcagtggacctcatcaaattaattcctgtcagtcatgctcagaggctaacataatacaaaaaatccttcacaggtgtgtctatatgtttgttttacagattgttttggatctggtcaagatgccaatattatcttctacagctgctcttaatgcatgttcctgttgcgaaagccagagagcttcagttatacaaggagtgccatttgttccactagttatttcctgcgagatatgcaagctcaagagtttcctttgtctatttatttcagtatatcattggcttcttttaggaggcaataaatggaaaattcctttttccatatctccagttgggaatcacctttatccattcagcctgaaatgatacaaagcaatgcattggcttaattattagatgcattcaattttcatggtcatggaatttggccaccataagatcagggcactggcacattttgtgtcttcttaaagctcacttccggttcacagatggctttgtctcaacgtggcctagaagaaggagaaagagagggagctctctgggcccctttagaagtacattaatccagtgagtaaggtttctggtctcattacatagttgtctacactcagcatttacatttacactggactacctccttccttactggaacaagtgacctcagtttgcatcaactcacctaattataattgttctaaacaactaaaagtcagaacccattgtttcctgtcataaagataataagacagagaaccaatatttaaaactggaagcatttattttcaaaatgaaaacatttggtgtgggggagacggatggcttgctggttaaagtgcttgctgtgcaggcttgaggacctgagtttggattatcatctgggcatagtcccagaactggtggatcctgcagacttgctccccagccactctagctgagacatctagcattctgtcccctgagagaccctgtctcagtaaaataaataataagatggacaagcaattgaggaagacatctggatgtacagcattcggaccattagtagtgaggacaacacagtgtacttgtttgtatctcaacaggtacccatctctcccacaggcatccctattttggtttgaactgcccatgtcttagtgactgctccattgctttgatgagatactatgaccaaggcaattcttataagagcaaacatgtagttggggcttacttacagttcagaggtttagtccattatcatcatggtggggattgtggtgtcatgcaggcaaacatgttgctggagaagcagttgagagctgtatcttgatctgcaggcagagacagagaggggtttggggctggcatgtgcttttgaaacctcagagtcttcactcagtgacacatttctccagcaaagccacacctactccaacaaggtcataccttctaatccatcttaaatagcatcactctatgatgattaagtattcaaatatatgagcttatggtggccatatattcttatttgtaccaccatagtcttttattcccaattccccaattgcctgtcccagagttttgtggcatatatatatatatatatatatatatatatatatatatatatatttctgtcttttctattgtggaacttgcacaattgtagcatgtttaaaggagtgttgagcaactgtctgattccacttagaaatacttcctactatagtacagattgataaattttcattgtctacgaaaaattactccacatgctgattggaaagatgcaaaactatatgtctagttccctagtcactaactagctggcttctttgctttcctaactttctgtctggttaatattttagaatatatttatgttccttttatataacaatttgaattttcatttacagataaaacaaaatataaacaattttagtggcattgatttttttcagaattagcaaaattgtatacagttaaggtcatgagttgattctttgagatacattgtgaagtgattgctgtaatcaagttaattaacatatccacagctttccagagttagtttctcccctctctttaattgttgcaggaatacataggattcactcttttaacaaatttcaagtgtgcatcagtatcccagcaggtctgtgaactaatcactctcttggcctcaggaagttgcagtcttcaccccattgagtttatttacccaaaggaccagatctatgtctataccttaaaagtgcagtgcagtgcccctttatgtgaacatggtagctaggtacagagttccaggcagcagactggaagatgatacagggtgagtaagagacagtcactgagataacccaattcaccccagctccctaagggcccactgtcattaagacagaccccacattcacacaggtcttagtcaactgattgtcctttctctcataaacaactttaaaagaaaggaacatgcagacaaaacataaaggggagagaaagcaaatggaatttgacaaaactaataagatctagcacacaggacatcatctgaagataaacttgattcaccagccctgccagtcagcaaatggcaaggaaattaagtgactatgtctcttatctggcaggacccaggaacagttgtgcaagagctgtctggacccaggcctctccattgcatattaaagagagcacagtacttttatttctccacctgagagaggagttaaggtctctcccctcagtgtctgaacagagaacaatgtaatctgccctatctctatgacctatctctatatttcataagtgttcctttcattccaactaagagttaagtgagatgctaattacagaagtatataaagcatggtgctggtgggctctttgtgatctacgtacagatctttctgtgatgcaatgggccatctctttcaccatcacctggccacaaatcacacataccgtctttactttgacagtaaagcgaccatcccttataaaacaatgagtataagaaatgtcttaatcacagaaaatgtgagttcaaaattaaattggccagtctcccttttaaacaagggggtcttcaagtataacagaactaaaatggtttttaaatgttataagttatctttcaattctgttgattgaagcattttggattattcagaatctctggtccctgctgtgctcactaacatctatgctgtgagacccattagagtacattaaactcttggtgtaaagttctgattaagtcattttacaggaggcaatgttcagattgtgggttaggtactctcaatcagtcattgctttttttgactgaaaccaattatttggaagatctgtgtttgtcattgactgactgaattccccaaggagggttttcagcaaacctgacatttgattcttcccttgctgagagtcctgtactgctaggtgagaaatggtggccctaccactcttcatgctgctcctggagactttagcggtgaaccattggtgttctctgagagaaacaccagaattccctcaaattccgtggtattcccctgatgacagcttagtaggtggtttagtagccaatgtttagggacagatgtcagatgtcacaggaaatgctttattctgtacattttaaattagtttaaaatcttaaagagcaatagatatccactctaggtaattaaggaaatgcacacaaattaaaaaagaaacaaatgaagcccactcataggtatctctgtcagaaagacactgaaaataccaacatatctatacagtcttatttgaaagctttatcatgaccatgtcctcaattgacctttgtcaatctccacttcttctcacaatggcctcctactgcctttagtatgaccccagccctgggtatcacctctacccctattgtcacaaagttcctcctcctctctcgacttagagtgatcttagtcaagctttttgctagatttacagagtctcggtgatggtgggagaaaaatacaatacatgaaatgtggcttcacagctttgccccaccctgagtcctattaaaaaccaattcccattggctcttagatctggggacagtgacaaacagctccaaaattaaagactgaggcttcactttatcaagtaagttgtattcatagagaaaagagtagacatttccattatcctactgtcaaccacagtttgagtgttacaaacctgatttgcattaatcttcaccaattacattttaaaaatgattttctttctgagaacatttcctgtttaagataattcttgctgtgcggtcctgtctggctttgaactcatcatcttcctgcctcagcctctcatggacatctttacatgaaaaacacctttgttgctgtggactatctgtccattgacacatggtggtctgtctttagggagtttgctaagatctggggtacattcactagaaaatatgttttgtgaatagagggactgtttctctgtctctttacatgcctaacatatatcattatgtacaataaatatggaattcaacatatttaacaaagagactattgacattaaaaacaagctgttttcttttttctaaatgtaatttttatttaaattagaaacaagcctgcttcacatgtcaatcccagatccctctccctcctctcctcccccacccctcaccaatccccacctcatctcccctcagctctcctgggagggtgaggccctccatgagggatccccaaagtctgttatattatcttgggcagggcctaggccctccacaatgtttccaggctgagggagaattcctctacatggaatgggctcccaaagtcaattcgtactccagggataaatagtgatctatgaccagaggccccatagattgccaaggtctcctcactgacacccaccttcagggggtctggatcagtcctatgctggcttcctagccatcagtctgggggccacgagcaaccccttgtttcaggtcagctgtttctgtgggtttcaccagcccggccttgacccctttgctcatcagtcctccctctctgcaactggattcctggagttcagctcagtgtttagctgtgggtgtctgcttctgcttccatcagctactggatgaaggctctaggatggcatataatggagtcatcaatctcattatcagggaagggcagagagagaccatgctaattaacaaaatcgtatataaaaagggggacataacaacggacactgaggaaatccagagaatcatcaggtcatactttgaaaacctgtactccacaaaattcaaaaattaaaacaagagcagataagcaatttaaatagacctataacccctaatgaaaaagaagcagtcatcaaaagtccccccccaaccccgcgcaaaacaaaaacaaaaacaaaaacaaaaacaaaaacaaaaaaacccagggccagatggtttcagggcagaattctaccagaagttcaaagaagagcgaatagcagcactcctcaaactgtttcacacaatagaagcagatgggtcattgccaaattctttttaagaggctacagttaacttagtacccaagccacacaaagacaccactaagaaagaaaactacagaccaatatccctcatgaacattgatgcaaaaatactcaataaaatactgacaaattgaatccaagaacacatcagagaaatcatccaccatgatcaagtaggcttcatcccagagatgcagggatggttcaacatttgaaaatctatcaatataatctaccatataaaaaaactgaaaaaggaaaaccacatgatcatctaactagatgctgaaaaacaagctgttttaatcttcaacatttcattttgcaacacagtagaaacatttccacattcacagcacaagctttggctacaggttttcctcaatgcaaaaagcccttgggtccatggctctctatgacacagaaaatgcttaattatagaaaggaaacagggtcatcacccataggtttcaaatcatctatttatctttaagaaagcaaagagaagctagcatgttcagaaaaatgctagcatgctttcaaagagtctaaagcagttcctttgattccatggaaagtgacatttacagacaaatattgactcctgttagaataaagcatgagatgttatttacaatgtacacaagtctagaaatctgaggaaggtctccataagactcacaaaatccttcttcagttagacatttatttccagacctaaaattacattatttcaatgaagtaatggctgcaggccatgctttgatttttacccctgtaatttcttttctccaaaaaagttaaacccttagaaactatcctggcatcctgcagatagatattctgacttcttaaacatggtttaagtgaccaaggtcaggtcttttactggtagattaagaaaatgtgatacttctggatatatttttgtgttgttcttcaagaaggggtaagacagccttcctggaatgaatggctcatgctggagacatcaagaggcaagatggaggctctgagtggtagagacattcagtgcccagcatttcccctgaaatttgctgcacagtctagcaggcagtttggtcctggagagagagagagcatttcatccctctccagtaggtaaatttccactgctttgcctttttacgagcattagctctttgttttattagtgctttcctgctcccagctggtcccccaaattggacaaatgagtctgatttacaaacagacattcaatggcagcctaataaatttttggtcactggtgtggtactgtaaacaggaacacattgctgaaaatataaaagactttatctgatgcttagcttgccaaggttagagccaagaccagctaaaatgtccttaactggaaatcatgacattgtagcctgatgtgccaccaagccctttggaagagaaatgagagcagacagtggagcaggaactgcctggcagctggaggccccatccttccacagccttaccctccccactttccccttcccaccccaccccccactgctgggaagtagtgctcctggcagctactactcatgcctatagatgctcctttccacttgaatctcatgctcttttttattggtgccaactttacgtattcacttaacatggggagatctttgggacacaacttccagggagtgccatcaaatattaattaatgcttagtgataggggacaaacatcccctgtatctggaagcaagcaatttgccaaagtgtttacttcaggcaggggaagtctgaagaaagattcatgtgagttggcagtaaggtgtagtgttttatttttaactaaattttatttaaattaaaaacaatcttattttacataccaatcccagttccccctccctcccatcctcccatccccctcccatctccctatcctacccctcagggagggtgaagcctcccatgggggataaccaaagtctgttacatcattcggggcagggcagaggccatccctcatgtatctaggcggagagagtatcccttcatagggcacaggcttcaaaagcctgctcatgcactaggcaaaaatactggttcatctgccagcagccccatagactgcccaagccccccaactgtaacccacattcagggggcctggttctgtcttatgcagctgtcaggctggagtctgtgagctcctgttgcataaccatgttttaaaatgaaggattgtttagagacacatgtgtatatatgaatacatatatccatcatgcagatcgctattgcttaggtcataatacacaactgatgagggaattttcctagcacgttaacccagcacctttgtggaatattgtctatgaagaatgaaagtattagaggccttggagaatgttggttaggtgatatgggcacccttaaagagttaagaaacaaacacagggccatttaaaaaaagacctgaaagcattttctcaggacatgtgagcataaggagcccaattccatgtaatactcttttcagctttgaagactttttgtctgatgatgatcaagatgttctgaacagaggatgggtctccgggttagcccacaccctccaagacattagagggagtctctgggagggaaagtgtttcaaaacaacggggtgttagtaagacaaatgagtgttcgtctcaggggtcttcagaagtaaattttctgtcttgtctttttaatgatcaaaatattgtaactcatgttagaatagaaaaagctctttgttcagttttaaagtaaataatgtaaaatcactccctgaactctaaccagactgtttaatcagctattgacacactcacagaacttgtccgtgtctgcatgtatcagaggtagactggtgacgaaaacactcagccactctacagtactcttgcactgtctggcacagggagaatggtggtagagaagatgcaaagaaaagcaaaacactggtgtgaaacatttcctcctctgttaccatccctttccctgcagttatatgattatttctctgaaataaggggcagcactttaatttccagtgttttctttcttccagttgctctggtctccttttgctcaagctgtctgtgtttctatgcactgttttacagattgttctttcttacttccaccatccaaatcaacaaagactgggttattaaaataattaattagttttattatgtgaatacacatttctaggattcatcattgcttattcatagctttttttatcccgattgcaataacattttcatattcaaattcaaactccaacaagtgctgaggtaaaatagattgtgccatgcagcccacctttgttcataattggccctgggctaccattcctatgttttcgtgattagactgaaggccattaataacattttatataagaaataaaaattcctcctgttgtcccagcataattgggtctcaagctgtgctgctatctaagttctaaatctcactttggtgatttatttcagttagtttttttctaaaatgggatttgggggcatgggaaggaaagatcccactgcttcccaaggcagaaggtagtgctggttaagttttatcatctgagaagagttaggcaaacctcatttgcaattccttggatatcattagtctactgccattttttaatattattttgcatggttggtattcaacccatggcctcatactttaggtaagtactctaccatgtggccttgtccctagcctgtggatttttgagacaaacttgcactgtgtagcctagactgcacttggaatttcagtccttcagcctctggaatgctgggaagacaggtattcatcaacataactgaaaatctacagagatttctttttaacttagttttaaaaaatgggttgaaaaccttctaggtgaaaaataaataggggtttcatgcattttccattttcagggcatctaagcctgtgcttgcaatttgaaatagaggctgacaggttggaataatgtttacacttatgttcaatgttaattacaaacagatgatgtaacttagtacagctattacaggaaagaattcctcaaaacatttaaaaaaaatggaactgacatgagattaaataattcatcttccgttactgagtacacattcaaaagaagtcaaatcgttctatgggtgtgttagctgcactaccatagtcatcacatggtagttcccaatcatcaagaatccacctgcatccactaataaaatggagcacatacatgttcacaaattatattcatcctcaaaaactaagagaggccaggcactggtggcgcacgcctttgatcccagcactcaggaggcagaggcaggtggatctctgtgagttcgagaccagcctggtctacaagagctagttccaggacagcctcctaagccacagagaaactctgtcttgaaaaaaacagaaaaccaaaatcaaaacaaaacaacaacaacaacaacaacaaaaacaaagagaggagaatacatatatcctcacaaatgcacacatgcacacacacttacaaaagacataattttatcattggtttttacattaactgacattaaaatcttgcccattggagataaatctgctcacataatttttcatggtgtgtgtgtgtgcgtgcgcacgtgtgtgtgtgtgtgtgtgtgtgtgtgtgtgtgtgtgtgtgtgtgtgtgtgtgtgtgtcacatgtaggggccagatcaagatggggtttccttggtggttgctgactacatttattatttgtttgtttgtttttttgttttgtttttgtttatggaactctcaaaattaatagcaatcctggtggtctgctgttctctacatctacaataaaaggattacaggggtttcccaaactcagctttttaactggggttatgcgttattgatctcaggcccttattgttcaaggcaaacactttggtgcctgaactatagccacaggcccctattaattcttgttaagtgctggattttatttcatagcattttgatgaagatttctgtttcttttacaataagaaaaaaataaatggtctgttatttttctttctcctgatgtcttaatctagttttagtgttaaaatagtgttggttttatataagtgggctacattccttctgtaactattttggaaaagaaattatggagtaattgtgtttttttatagctggcagaactcatgacaaacaaagccatctagatccattgctttctcttctagaagttattatttattcagtctctttaatagaaacaggactattgagttttttcatttgtcttgagttagttttgatattatcttcaagtacatggcatatttcatccaagttatcaaatttctgggcatgatgttgttcacagtggtcctcagttatttgcacgacatccatatatcattaatgatgacccctattttatttatgatattggcaatttgggtggttatttttcatggttatcaggctagatgtttatgaatgctgttgatatttttctgaaactgggggtttgctttgttgttgtttgtttggtttctttggaattcattttggcttgcattagatttcaagttcccttttgtctcccatactgacaggatccgtattttcttctccaatgtatacatttacagctattcactgcttttgctgcagcccatgcatttcaatagattgaatttgcatgtttaatttgctcaaactaatatttaatttgtcaatagcatgtcttctttggccatgtgctataacaaaatactttgtctaatttatagatattcagagagtttttcttatattgatttctacaatgagcttgtaataacttttgtgctcctaaatttgttaagacatgctttacgacccaaaatgtgcattatcttggtgaatattccatgtaaacttcagagtactgttgtttggagtgaaagatattagatgcaagtcaacttatcccaagtcaatttaccccaagtcagcttcagattaatgtattctcactgccatttgtgctggttgatctgttaggaactgtcagttcctagcagagcagagcagaacagacattcccaactgtaattctgggactctccctctctctctctctctctctctctctctctctctctctctctctctctctctctctctgttctagatctataatgtttgccttccatattttgaagtgcacacacattaaatcatttctttttgttaaattgacctctttatatatcagtggcatcattgccactgatcttgtttgttacaatccccactctataactatttgctagcacatgaacatcttgatcagtgtgaacaggatccatccttcctaatctctctattttaacacattagaatgtggcttcaccctgtaatcttaacacttggaggctgaagcaagatgactgcctgttaaggtcaagctgagctatgaactgagttcaaacacagcttgggttacagaatatgataaaagatgagagtgaccttcctgatccctcatgttctcctccccttcccttctctcctcctctttctatgagttgggggaaaaacagagaaggagagcaaggaaagagataccttaatggagggaaccattatgggattaatgagaaatctggcactaaggaaatccccagggatccacaaggatgatgccaactaagaatctgagcaatagtggagaggcaaccttagtgcccttcctctataatgagattgatgactaccttaaatgccatcatagagccttcacccagtagctgatggaagcaaaagcagagattcacagctacgtacaggaatctaattgtagagagggagtagtgatgagcaaaggggtcaagatcatgcttcttataaagtcaagaatctaaaacagacagacatcatttattatttgatagtggtagcaaatggatgtatggatatatgaatctatagagacacaaattaatgaagccttatgaatcacaagtaaagcaaataaaagaaggatctggtagtatggttcagtgttgagtgcttgcccgccatgaacaaggctctgggttagatcctcagcaccaccaaaaacaagaaataaaaaaaacactttagaaacaagaaggggataagtttataaagatcagcccaggaaacaaaacacaaagagtgagaatgagagagggagaaacgagattttagagcatggtttcttaaaatggaggtaattaccacatgcaggttatataactgagtgtgaggagtggtcataaaaaagtatgccaaccaaaaaatatgtcaaccataaaagggttctgaatgcaacaaccaaaaattaattcaaaacaaacactttgtggtcttgaggtgttattatccatgttgcctcacaatgaccacttttttgtttgttttaaggttagctctaattatgtagaccaggttggtcttgaacacaactcccacttgacttagcctcctgaatgcccttttaaactgacatttcattataattcctgggaaaatattatgtgtcccagcaagcatgatggtatatacatgtaatcctagcttatggaggctgaagaaagagaatcatatatttaatgtcatcctagagtacatagtgagtcctagggttatagaagacactatttcaagcaaattaacagtaacaacagcaaacatatatactgagttccctatgtagccatgtccactgtgactcttggtgctgtctttggttctatcaatccttgacacagtcaagttcagaaagtccttcctactgtctcctgagccagaggattttcttgatggcatattcccttcatgctttgaaggatatgttatctatggaaacatttttggtataactagtatattcctctttagattgtgtgtgtgtgtatgtatgtatgtatgaatgtatgtatgtatgtatgtatgcatgcatgtatgtatgttctttgctgcctacattgaaataggcataccctcaagaagacgtatcatggcatcaaaagaacctgatttgctcacctataggactcaggcagatttgcgttatgagtgtttgctatgataaggaagccaaatccagaaccagctatttccttttgaagtacatgaagtgatgaagtgttacaaactatgttactttctatcaactaatatcaccataacatttgcatgtggtagtgatgtgtaaaacatcttagttggttatcacaatgaaattttgacagaggtactttattaacttcatgctccagagaacaccaaggtccagagactggaagtcaccggctagtgttccacactcccatgtactagacacttggtgcatttctcaatgctggttggatttctgattctgtttttggtttctttcaggcagaatccatgttttaaaaagtgtgtatgtaggatttgagtgttttcaaatgttcaggagagcacatatgtatgtggaggtcagaggataatttgcaatgtctgcctagattgtcatctatcttatatattaagaccgggtctctctcttgaatctaacccttgctaattggactactccagttagccagtgtgttccaagtattctttgtgtctaccttctaagcactggggttgcaggtgagctgccatgccttctatgcatttctgtggatgttaggaatctgatctctggtctttgcacttacacagcaagcaccttaccctttgagctgcatcttcaaccaccaaactttgctcattcattccttatactttattattagttactattcacttttattaggaaaaaactctattagtaattggtaaaagccaagtcatattttgatttgtttttaaatgtggaaatgtttaaaaatatatgaaagcccaagttacttctttcacaacctccttctgctgagaaaatagacctgctttagaaagtcctaattcagtaatagtccacttctatttggctgcattggagaataaaatgttctgtatgtgtaatttccccaaatgtctgaccttaccttttcaaatgccaattctaacagatataaaagatcatgtttccaaagacttctaaaataaccatatcctactctaagcaaaccttgcttttctgactcagaatcatcctgagtgcctattatttcactagtaggtaaattacctttgtatatactttagtatttccatttccttgctagatatcaatttttctttatatttccttctaacacacacctggatagatcctaattatatttaatctatatgatgggaataacacaatgtatttttacaaatttattttaactaggtgtatatgcatgtgatggaatatacaactgtatttgttttcttataaatatgtttttaattgaaatagaatagaattgtatcactttccccctctcaggtaccttctcccaacacttcccatcctccctcttcaaactgataacctttttttgattattattgttacatagagctatattcaaaaatcacccacataaacctaagtaaaagattttgcctaaatatatagaatccaacgaggattgttgcaattattgttttcttggttccaacacttttcagtcttagtgagatttctcattgtctttgggaggctgttgtgctctctgtggataagaccgtgtttgccttttgtgactgggttacctcactcaggatggtttcttctagtcccatccatctgcctccaaatttcaagattacatttttttccaatgagtagtactccattgtataaatgtaccacattttctctatccattcttcagttgaggaccatctaggttgcttccagattctggctattacaaataatgctgctatggacataattaaacagacttccttattgcatgaatgtatatctattgggtatatgcctaaaaatggaattgctgggtcttgaggtagactgattaccattttcctgaggaaccaccatactgatttccaaactggctgtatgagtttacacttcccccagcagtggaggagtgttcccctttccctacatcctctccagcatagattgtctttggtgtttttatattagccattctgacaggagtaagatggtatctcagaattgttttgatttgcatttccctgatgtctaaggatgttgagcacattcttaagtgtctttcagccattttagattcctctattgagaattttctatttagttctataccccaatttttaattggattttttagtgatttggtgactagctacttgggttctctgtatattttggaaatcagccctctgtaagatctggggttggtgaatatcttttcccattctgtgggctgccattttgtctttctgactgtaccttacagaaccttgtcagtatcaggaggtctcaattaataattgtcaatttcagggtgtgtgctactggtgttatgttcagaaagcagtctcttgtaccagttcattcaaaggtacttcccactttcccttccatgtggctggatttatgttgatgtctttgatctatttggatttaagttttgtgcatggtgatagatatggacctatctgcagtcttctacatgccagcatccaattatgccaacaccatttgctgaagatgctttcttttttcaattgtataattttagattctttgtcaaaaatcaggtgtttgtaggtgtgtgggttaatatcagggttttcaattcgattccattggtctatctacttttgtgtcaataccaagctgttttcgggatatagctatataatatagcttgaaattcaggaatgattatgcctctggaagttcctttattgtacagggttgttttgactatcctgggtcttatgtctttccatataaagttgagtattattctttcaagttctgtgaataattgtgctgggattttgatgaggattgcattgaatctgtagattgcttttggcaagattgccatttttactaggttgatcttacctttccaagagcatggtagatctttccattttctggcatcttctttaatttctttctttaaagactcaaagttcttgaatacaggtctttcacttgtttggttagcattaccccaagatattttatgttgtttgtggctattataaagtatgatgtttctctgatttcttcctcagcccatttatctgttaatagtcaggctactgattatttttctagttaatctcatatcatgccactttgctgaaggtgtttatcagctgtaggagttccctggtagagtttttccggtcacttttgtaaattatcatatcatctgcaaatggcgaaaatttgacttcttcctttccaatttgtatccccttgatgtccttttgttttcttattgctctagctagaacttcaagtacaatattaaagagatatggaaagagtgggcagccttgtcttgttcctgattgtaaaggaatcatgttgagtttctctcaatttagtttgatgttggctgttggtttgtagtacattcttttatgatgtttaggcatgttcctgttattcctagattttatcaaagactttcagcatctagtgagatgatcatgtgtttttctttttcagtttgtttatatggcgaattacattgatggattttcaaatgttgaaccatccccgcattcctgggatgaatcctacttgatcatggtggataatttttctgaatgtgttcttggattctttttgccagtattttattgaatatttttgtatcaatgttcatgagggatatttgtatttctttcttacttgtgtctttgtgtgacttgggtaccaaggtaattgtagcctcgtaaaaagaatttggcaatgacctttctgcttctattgtatggaacagtttgaggagtattggtattagctcttctttgaaattctggtagaattctgcactgaagccatctggccctgggctttttttggttgggagattttgatgactgcttctatttcattaggggttataggtatatttaaattgcttatctgctctttatttaattttggtaagtgatatctatccagaaaattgttcatttcctttaaattttcgaattttgtgagtacaggttttcaaagtatgacctgatgattctctgaatttcctcagtgtccgttgttatgcccccctgttctctctgccttttggttagtatggataaaggtttgtctatcttattgattttctcaaagaaactctttgtttctttgattcctagtattgttttctttgtttctactttattgattttagccctcaatttgattatttcctgtcatctattcatcctgggtaaattttcatcttttagttctagagatttcagctgtgctgttaattctctagtgtgactattctccaatttcttcatgtgggcacttagtgctgtgaacttttgtcttagtactgctttcaaagtatcccgaaagtttgggtgttgtgtcttcattttcattgaatcctaggaagtctttaatttctttttttatttcttccttgacccaggaatggtgctactgcacattgttcaatttccgtgagttggtagagtttctgcaacttttcttattgttgaattctaactttaaagcattgttgtctgataagatacagggggttattccaattttttgtatctgttgagtcttgctatgttgctgagtgtgtgttcaattttagagaaggtttgatttggcactgagaataaggtataatcttttgtgtttggatggaatgttctatagttgtctgttaaacccaatagggtcataacttctgttagttcctttgtttctttgttaattttctgtctgttggtcctgtctagtggtgagagtgtggtattgatgtctcccaatataactgtgtgaggttttatgtgtaatttgagttttagtaatgtcctttgacgaacatggattcctttgtatttggggcatagattttcagaattgagacttcatcctgatgaattttttccggtgaacaatatgagatgacattcttcatctcttttgattgattttagtttgaattctaatttgtttatatagtaggatagctacaccagcttgtttcttgagatcatttgattggaaaaccttatcctaacactttactctgaggtaacatctgtctttgaagttgaggtgtgtttcttgtatgcagcagaaggatggactcagtcttcatatctattctgttagcctgtgtctttttataggcaatttaataccattgatattgagagaaattaatgaccattgattgttaattcttacttgttttggatttgttgctagtgatggtattgtgtttgaattccctgtctcctttcttcttttggcttttggtacagtgggattatccattgcctatttgtgagtgtagttagcttccttgggttggttgagttttccttctagaactttctctcggctggattagtggaaatgtattgtttaaatctggttttgtcatggaatatctcgttttctccatctacagtgattgaaatctttgctgggtatagtagtctgggctggcatttgtagaatatctatccaggaccttttggatttcagggttttcatcgagaagacaggtgtaattctgataggtctgcttttttatgttacctggccttttttctttgttgcttttaatattcttcctttattttgtatgtttggtattttgactgtaatgtggcaaggtgacttttttgtggctcactctatttagtgctctgtaagcttcttatactttcattggcatgtctttcttcagattgggaaagttttcttctatgattttgttgaatatgttttctgcacttttgagttgggtttcttcaccttcttctatacctattattcttaggtttggctttttcacagtgtcccatatttcctgtatattttgtgttaaggatttgttggacttaagattttctttggttgatgaatctgtttctcctagtgtatttcaatgcctgagattctttcttccatatcttgtattctgttggttatgcatgcatctgtagttcctgatcttttacctggcttttctaattccagcattccctcagactgtgtttttgttggtgttgctgttgtctctgtttcagtttgcaaaccttgcactgtttgaattgtgtgttgcaatttttggtttgtcctttcctccatttcttgaattatttgtttgttttacctccatttctttaaaggattttctcttttatggtctctatcatgttcatgaagttgtttttaaggtcattctcttctgcttcatctgtgtagggatgttcaattcttgctggtgcagagtccgtagactctggtggcatcatattggtttttctgttgttgaatgtgttcttatattgtcatctttccatcccttcttccagtggttataggtggggtctcttcctctcctggtgggtatgggtccaaggttctcatctggtgggtgcaagcaggtccaatattctgatgggtctcaagatgggtgcaggtgggtttgacacatcccctcttccagtgagtagatgatggactagtactgccatgtcagcaaattctggatggcttaatctgccttgggtgagtggacctgcctgcagtccccaggctaggagatcccaaatagggcaagcagaagtccggcctaagacaggggcccatgctcacccctcccctgagtgggggcatgactatcacagagatgtcagctgactctggattgcttggttcactgggggtggggggatagacctgcctacagtccccagaccaggatatcccaaagagagcaagcagaagtctggccttgagttctaaagttttaactagagtatgtagataaatctgcaggaagatcttgactttgaacttgaagttcacacacacacacacacacacacacacacacacacacacacacacacacgtagagaaagattgttctatgaaacatgaacttgattgggaagatgttaaaaatttggtgcaagaatgtgctgaaggagaattggatacatattgctcttttttaatcaacaacaaaaaattccaataaacataatcggctttcatgtgcggttttcattttgctttgctttcttggaacagtggaggctctccatttgggaacgctaatggctgcccatggctacttctttcccatctcagatcatgtcctcacactcaaggatgatggcaccttctaccgatttcaagtaagtggtaacatatattcttttgcaataaatcagaaagcttgaacttcatccctgtgtgtttacagatcttttggaagctattacatggttgtcataggctacttagaaagtaatcagtgttcagatataagcatcagaaacaatcataagacaccaatgggaaaatgtgaaagctgactatgtaattatagaagttacattttaacataagaaaaattcatgaggtgatttactggagtcaaagaaaatagggaagacttcagttgtaaattgcatttagcaagcagcaagttgagacatataactaaacttatactcccacctgtgtcccataaccagcttcagtcccagaaaactgttaatacgtagcaagtattgttgattggcaagtcaattgtctatatgtgtctaactcttcttgcttatgaaggaaattctttgctaatacaggattatgtttttatatggttctaatttttagaaacatttttcacactgaagctacaagtaaaatttaagactaacaaagacaaattctggaggaccaattgttctatgcttataaaaataaaaaaattctgtctttataatcaatatgataaataaactcttcagtgtgcaaaaaacaataacaataaaaaacaaaacagcagtaacaacaacaacaacaacaacaaaccttaatcggagaggaaatactggctatagccactctcttaagaattaagagtagaagccgggcgttggtttaatcccagcactcaggaggcagaggcaggcagatctctgtgagttcaaggccagcctggtctccagagcgagtgccaggataggctccaaagctacacagagaaaccctgtctcaaaacaaaaaagaaaaaagaagaaaagaaaaaaagaattaagagtagagatgagaaaaaagtatctatttgaccatatgtctataagatatacaatctaaagctagttaatatgcctacacaaggatgtacacacacacacacacacacacacacacacacacacacacacacacacaccaaaaatgaagcaatcagtgctccctctgagaggcctctcaaaagcagagccctacatgaaagcagttttttgctaattcattcccttgtagctttactgaaatcctggtcaagtttaatttccgagaaaccaaatcttcaaacttctgtctcctacagagttaagtgtgattagagagggtaagagtgttccatatatgtcttcccacccctcttaatctagtggttcagtgttttttcctccaaattcctacagtgattttttcatatgtgcacagaactactattagtagccttctttattatactgaagtaatttcaaagaagtaggggctaagtcaagaacctctggttgtcttagatcgtgtggaaaagggccctccccttagaacttaataacttatccaaagcatccctttctccatctttgaaagtcactcttgctagaaagtaaaattatcagacaatcagaaaatgcccaaagtattcttattgcacataaatgatgtgtataattagttaatccatataatcaacccactctatgtgcttctataaccactgttcctatgagctcttgtgtcattcctatttcaatgaatggagtcgcttatgcaaatctgtggtcaccatgaatctttttgccaggtacagcaatcagggctagaaaaatcctgaaacaatgctatatcaattatcttaataaggtttttattccagatcaatgtatttgtatttcaatcagtgtacttgtagaattttacagaatcagatttctagctattgttaatcacatcaaagatattgttagtttaaaaaatgatctccttttttgtaccatttaaaagtttacagcaataaatgaaagaatattttcatgagtaagggtcaaaggttactgtcatcatgttgaataatgttgaaaactgcattacatcattaacagatctgattcacaaacctcagggatgattctcaacttttaaaatctatgaaaatcaggaaagagatctgatgcatggaaataaatcactgtctttaaacacggttcatcccaaatcttgctaaacataatgttctgctttccgccctctctggggctaaaactgaaccttttgtttggataatgcagtcatagcctttaaccttatgtccattggtgcaagatgatggaaaatgagcactgattcaaatccctgctggtgttggtaaatctgaatgctgagaaattggtcagcacctgtaggtgagaatgttataatacctctctgctagcttcatctgggtttaaaatgtgtgttatcaggaacatagactaggtagcccctgaagtaaacccaggctatacaccaaaagcctactaaatatttatgtgtctaatcaagactcctcttttttcttccttagacaccctatttttggccatcaaattgttgggagccagaaaacacagactatggtcagtgcaatgttctttgttttatccttaaacacttacgtgtatgtttaccaagtacatgaattctgttgcttttattaatgagagaggaaaccacaattctaagtatggatcagaaaccacaattcaataatgataacagccaatttatgtatgacttcatttggcaagttgctagccttgatgatagttcttctatagtaagatgttctctgcatctgttaaagaaaagctcctccttacactagaaagcctcaagtggttatggttggtttttcatagcatcctatacaactaggaagagtgacaaatggtttcagagagccatcgtcctagttctccttcagtcctctattcagatatggagttttgtttcgtttaaaaaaaatcaaacaaaaaccctctggctcttcaaacctctacttttctaactcttagcaagacatcatttgatgctacacaaaaaggttatattaaacatgggaaggccactgataaaccaatgaaaatctacaaaatgtacaatagcaaatttaatcctaataaatcaaattcagtaaccttaagataacctcaagctcaataatgaaaatttcaatcaagctctaaaagaaaaaaaaattgtccctaaaaagtgtttgtcgtcatgcattttcctataggtgacacttttatgaaacaagattggacaattttaagcaccatgtctacaaatgtttactgcaaaccattcctgcaccttactgtaaaaggtgttggtaatttatagggtgtctgacttatgtacagcattgaggggctcataacctagaaaagaaagtagaatcctacacaaagagttctggtaaattgccatgttaataagctgttggtatgtgcaaaatgttttggaagtttaaaggaagattgactttatttggtggtggtggtgggtgctatcctagaatgatttcataaaataacttgtaacatctgagactaattttgaagggggaagaagaaattatgaaatttcttactcttatattgctgtgagaaacaccatgaccaaggcaacttatgaaggaaggcatttctttggggacttgctcaaagagaattagtttatgatcatcatggtggaaacagtggcatctggcaagagcatggtgctggatcagtaactaagaacttatacccttgtccacgggcaataggtagtgggtgggagagcaagattgggcctggtgtgggctttggaaacctcaaagtccactttgcagtgcacacctcccccaacaatgcctcacctcctaatccttcccaaatagttctattaactggggaacaagcattcaaaggtgatcctatagtggccattttcattcaaaccaccacatgtggtgatgagacaggaaatcatttaagaaagtgtcttagttggggtttctattgatgtgttggaacactatgatgacagcaagttggggccatggggtttgtttaatgtatacttctagatctcagtttatcactgatgaaaatcatagcaggtactcaaacagggctggaggttccagaggcaggagaccacagaggagtactgcttactggtttgctctccatggtttgaaaattctactttcttttgcatatcacccaacaccactatcctggggattgcagagctcacaatgtcctgggcccgcctacatcattcactaattaagaagatgttctctataagcttgcctatatccagtcttatggaagaattttctcaattgagatttacatctctcaaatgactctgtcctatgacaagttggcataaaactagttaatgtagcaagaaagaataatataatatgcaaaagtagtgagaaacttcacaataacttggctttctttggggcttcccctggagagacatcttcagaaggaaattgtagggaaatacatagtaactgattggaatccttcctagtgatcactgtagaaacatgaatttagtgagttataccagagtggccaggtgctacagatggtattcaaacattcaaacaggaaaagctactttatacaatactgttaaattatcaagaaactagatcattctactaccggagcagaaatgctcatttcttcatctggcactcaacagtcctcaaaattgaatcccttaaggaaaattgagaaacaactactgatgtgctagtcagggttggagctttctgtcaaaggtgggaatatgccattctagtagaggaaaaaactcccagggaaagacctgactccaatggttattatgacaaaaggctaaattatgccttcgaggggagtgtgacataatttctgaatgtcaggttgctaagtctcaaacaaggttagagatggtgactttgtgaaatgattggagtaattcatactcatacacctaaggaaactgacatcattcctgttccaacctcactaactataaactagtgatttgattttttcctcattattattgcccatcatacactatgcctctgctctctgttgtaaagagaattcttttttattcatctatttattttacatccctgatgcagcctcccccatcctccttcccagtctctctccctcatttcctccctgccacccctcaatggcctcctcttctgtctccatccaggaaagagcaggtctcctaagagtatcaatagaacatggcatattaagttacagtgaaattaagcaccacccatgtattaagactgcgcaacatgatccagtatgataattagggtcccaaaagctaataaaagagtcagagacagccctggtttctgctgttaggaattccattaaggggcaagctacacaactgtaatatatatgcagaatgcctaggtcagcgcaagcaggcaccctggttgtcagtttactctcttcgagcctctatgagcccaggttacttgattgtgtgagcctttccatggtgtccttgtgtagacagaggttctatttcacccagtcccacggccatttagacccaagtaaacacacagaggcttatattaatcataaattgtttggcccatggcttaggctctttactggctagctctcctttaattattaacccatttctattaatctaagtatttccaagtggtcttggcttattggagaatgctcagcatcctatcttcctggtagttacatggcatctctctgctctctcttcccagcattctccttgtttggtagccctgcctatacttcctgactggctactggccaatcagcatttcttcatcaaccaataagagaaacatatgttcacaatatacaagacattccccatcttccttgacccctctggctcctacactcctttctcctcctcctttacaggattcctgaattctgcctaatgtttggctgtgggcctctgcatctgcatccattagttgctggatgttgccttaaagagaattcttattcttggcatttctctcttccaatctttgtctttttcatttggcagttagtgtaatcacaattgcaatacatgtctaatgacttggtagcagatttatgtacccatggtgtgcctgaggaaaagtcatgatatctacaataaatactcagagaacacggttcatagtgggcatccattatatctaatgtcctttagctttatcctaactcttactgttatccacatcagaaggtatggtctcctgaactgtttcccaaagcatagccagcctattcgcaaactaactggaatcatattgttcaattatctcatttgtatttccctgatgaatcatattttgatttattttgtagctggcttacttactgagcatcaacataaggatgtttaattacctgtgacttgtagtgggctttctcatactgccagcccccaaatcatgacatggaaacttaatattagttatgaaagcttggccttagcttagttaggcttgccccactagttcttataacttagttgaacctgtttctcttcttctgtgttttgccttgggggttttaactttatttcattctgcatgtcctacttttcctgcttcctccatgtctggctggctgctgcctaattggctggccctgggtgtgtctcctttctttctccctcattacctcgtctcttctctcctgaggctagattcatcctcctatttattctctttgccttccagctccacctatccctctaccgcctagctattggctgttcagctttttattagaccaatcaggcaggcaaagcaacacatatttacattgttaaacaaatgcagtgtaagcaaatataacacatctttgcatatttaaagtaatatcccacagcaatggcttatattcttaggtgcaaataaattgcactaccaatttgaattactccagtcttccattttctcatgctatttatttaaaatatattctttaaaaaaccttctttgaaagggtattggtgatatgacatgattgggctttaaggtctaaagtacagtgactacttaggctgtattttctaagacaactttgtggcctagaagcagaataagtggttgtattcttttgtctttattgtttgagatccattctctcaaatatcccaaacagacctcagactacaacccacctgcctcagccctgaatgctgagattaaaagcaggcatcattatatgaaactgtaaagaaaatttgaaaaagtttcttttactttcttggcatcttgacctctttttcccatcaccaagcttgagtttattttatatgctatatagaacacaaacctctatagatcagcccatatggcaaaaacatgttttcatagctatgttggcactatattgatagtttttaactgctaaaaataagccaatatagacatagaccacatctacaagaactccattcttgaaaaaatcaaggtgagtgagaatttgcatattgtttgtgtaaattcaaaaataatcacaatcctaacctattacagtgttgagaatgtatttctatgggtgcatttgcatcattcagggtgagatctgggtttgtagtgaggcctgggggctgacacatgaggaagcagaagacaactttggtgagaagtagatagtgccagtggtgacaaacaggagcagatactgaagacaggtgttttgctagtggctctagttgtattcactgcatatgaaaagtctaggacatgaatttcaatggtcgaatatccaatatcaagataggatttttgcttgcttgttttcattttatttaaagattttcaaatttcaatttcagactccctatggagcctattgtgtctaggttagcctgaaattggaaatctacctgccaaggcctcctgatttttaggattacaaatatgtgccaccatgtccagataaataggattttaagcataagaaatacaactttcctataaagacaggagtcctagtggtctcacttcatttggtccatctatactctagccttgcctttaaatatttgatacagtattcactatggacattttaaaaacatttttcttgtttgaaatcatattttcaaatactgttgatcttgattactgagaacttttttcctctggtgatcttaatgaagctggtgatgtgtgtagttctggggccatctttggtaaatatttgatcatataaatgagtatgacaaccaaagcctgaattgaaagacctatgaatatatcactaaaaggaaaacaatgaagatttggtatggaaagactgtgatgtatagaagggagaactctctgctgtgctctgatgccaacacaggcaacttgcaggaaggaacattgaattcttatataaggcccttcaagcaacaaaactattccaaaactaacatgaccattacctgagaggaaaatgacttgtgcctcaattatattcaatgaagttctgctatttctctaggatgctgtagaggttttcagacctttacatagatattatgcctggtggaattaaacaattacataagactaacttccacttgccaaaaccatgctaaagtgatgttaagatataaaggagagctaaggcatttttcttagagagtattaaggggccagcccaaacaaagaattattattggcacagtattgcaacaacactgacataattactgatttgcattaagcaataatttttctttaaaggaacaggtataagactgatcagttaccattggtagaaagtttactgtgttcaaacatttgtgtttgagggagagatgactggaaacttatggactaatataaaacaacttcaaagcaggcagataaacaaaaatgaattaatagtctataagacttcagaattatggatcgaatcttgaatagctgacaacagtgccttatatagcctaatacgttaataattctgttatctacagttttgagatgctctagatgaagatgatggggacagggaaagaattctattttttaaaattggaaattatttactcttgatttgtcacattgaaatgctttcaaatcaacctatccaactaccaaacattgtagtttatttgagtgacattagctgatattgattattcaagtctcattttaaaagtgtctcgacaaagcatccactcttcttcttttccttcctcactagaatctctcaatccatggccattgctttcaatatccattaatgttatgtttgtttagaaaaccaggtgttagtagtacttgtaactgtattctagtgagcagatttttaaaaattaataggcttcagtcactactgctctgatggattttagaaggataatagtgagttattaaacttttaagtataaagatacagatatattaaaagtaaaataattgataaatatttgccatgttacagttattgaaataaatctacagtagatatcttggtcactattgtattgctatgaagatacaccatgaacaaggcactcttataaaagaaaacacaccaactcttcctgtgtcttactcctaaatgtattttctcttatttagttattgctattatgtgtacacactcacacacatttgtttatttaatcatgctgagggcaatgtggaatttcccattcctattggcattatcaactggtaccattatgctggcctcaaagtcttgggttttctttatttcttttcttttttcttagaattctcatctctctgattgcatgtctcacttgttctttcatactactagctttttctatgaaaatacttgtattttaatcatagtttttagatttatgtctaaagtgtatcatctattctgtttttgaataacattcatgcacagggtttctcaacagattttgtcattcagtatgccttagagttttctcttgaaaacagaacatgctgttctaaatagaagcaattaagtctatacatgttcagtgcgagaggtcatgctttccagctaagtgattattttactgttttcttctgctgtgggttttgtagtctagacctttggttattgttttagacctctctccttttgcgttcttgagtttccctagaagcaacttcttcttcttcttcttcttcttcttcttcttcttcttcttcttcttcttcttcttcttcttttttcttcttccaggtcggacatatgtctttctttcagtcctattccccttctgacgttagacatttctgaaattcaaccattaccttcaagaagactgtcattgtttaaaacattgtgtagaagtgtatctttggggtaaattacaaatgaaacaatctccagggaacaagtattgaagaagaaaaggaaagctttatccacagttgattgattaatcatcttctcaactcttgaagttcaggggatacacatataacacaggaataataagagcaggcagcagcttactaaagaggactaatatctgcctttccttggactaggtagagatcttccagggacttccttttgttcctttcatgttgtgctgtttccaaatatggtggttagtaaatgtcctcagcttagcagaggtccctattttacaattctacaattctagtgggcaatgggtctatagatgatgctattccaaaggctaaagtagcaaatgaaaaagacacactatgcagacagaggaaccacatcttgtgatctcatttcagctgccatcagataccacaactcacatgcaaagttagtgttgcaatacaactatctttcaaataacctaggcaacttaaaaatctccaattttggaaaaatatagtagggtaatattctaatttctagagagattggactgtcctatagctattttcatataagatgtcttctttgcttttttgtttgttataagtggtaatattagtattaaaattcattttgtaaaataaatatccatcatgagctaataaaatatattcaagagtgaaaatacatccttaaggagaaaaatgtggcttatttttataatagtaaaagcttattcatgatcaagactatttattaaaaagaactaaaatatttatgccatctgaagaatgggaattatacttgtaaattcttcttaacaaaagcttttgacatttcacaaaacttctcagtgagaatttcagttgttaaatagtctatctggcttttagggatttattttacaaatatttaagcacctgattctcagtcttattcaaatatctacatataagactatctacatttaagaatgttacaaaagtgtataaatgtataggctatagaacttgtgtcattataacttgaggacacaaatacttatccaaatggaaagtgaactatttttaagtgtgatatcaataaaataaatatttaaatcccactagtgttttgactgtgcccccccagttcacaatctggtctctaaagatgtattgctatattaaaaattgttgcacaaatttccaatctaccagcttgagagcatatagctatttgtctttctatataagaaaccatcccactgacttgggcataataatacctaatcattgggttccttctttacttctctggtgagtatgtctttttacttcaaattatctgcaaagcttttaaaaggaaaggagtacattttctgttttatactaatatacattaaggtcttaaatgtctaactagtatcaattttacttttgtctttacatccattatttatttatatattaagcaagaaatagtattccatcatcgaggtcatatatacacatatgttaatataatgtgtgtatgtttggggattgactattctcttggtgtagttctgacttacccttatcaataagagtgattttaaatataaattcttgatgtttttgtcaaccagttgagcttaggattaactcttcaaggtgtacattaaagactgaagaccagtgactatttggctttatggagacaaattagtttgattttctatttctgatggtttcccattatgtctgattttgaatggttatttctgattgtctaactacattttaactgatagcaggagcttgagcattccctttcaactgtcatcaggcatttagaaacatcatctaatttttatccctcacaaaatatctttacagtgttactagtcatgctctatagatgaaaaagctaagaagtagatgtgtagaagctctaatccactgatattaacaaaggacaggaccaatattcactgggccagattgtttctcagctggattgcacagaaaggtaaaaaggatgagaaatttaggtaaatggaaatttggaggatttgtgagggaaagaaataaggcaacaatgagcttgagccaatttcccaatatttgttaaggagatgaaaaacagaaaagaaggaagagggaaagaaagaaaaaataagcaagtgaatgatggatttttaagggggagggttaattcctaaaatacagcattaagttccatatggaagaaagctaaacacccattagacaaccttcaccgaaggtctcgacatgcagagagagagcaaggtaacacgtgtacttggcatacatgttcaggttattgcccagacagaaaaattcctaacaagcagtctgtccagatgatatttttctgtcaataacttagtttaggacagaaattcaaactcttctgagtatgacacctttgtgtcaatcaaaatgctggggttacaagtaaggtttagatagaagaggaaatgatggtatcagtaatgtgacattgtacagaatatacactagaagtgatgagtctgcttcacaatgaggactgcggaaactcacacttggactataacatgacctttttcgtttgtgaacttactagtttacagcccagcaatgccacttatgcagacatggctctttatgttctgtgggattaatcaattgactttaacaaacttaattgacaggaaacgaacactgcttttcaatttaaaaccgtgaacattattctctgaaaatcatgaccaaaacagaatgatgctctgggcaagcataaaatatcctctgagattagtgcaactaaatgatactgccaagtttataaagtagaggcctcggtaagttttagtagccagctagcttcactttgcgcattccagttatagtctagactatttgcttgtcattgttctgtgtgaactgaaagaaacaaattcaatgtaagggcactttagagcccagaacagtgacttctctgtagatcttaagtagtgaatcatggattccaggtttgtgtggattgacaaactttcccaagcctagttccttgggtgagccaagtaaagcacattttcttatgaattattgaaccaaaataccaagggacccatttcaagcatagtacaatgggtacaattttgggttaattcgtggtgagggtcctacattgaacaaaaatattttggttttggtaggttctaatctaacaaagaagggatagaacgaatgctagagacttacaaaatgtctatgtgcattactataggctctttaagactgacaaaataataattagtttatccctcactttcataagctggtaaatacaagtaacattctgatcgccattacaattttactaaaggaaaattgctactcatgctggtcacagtataaacaatgacacttctgacttagtgagatgttcaaacgtttaatctcaagtgattttccagaaaagctagtctttaatgaaaaggaccactcacatgttcaagttcagcaaactgagggtagagaaaaggtactgtttctatgatgttttgagtgaaagaaatcttttgattttacactaaagagggagaaacaatgtgaggtccctggtaaggttttgaaaggaagcctcccagtccccccatgggctcatatattttagtgcttgctcccctgatggtggaactgtttgggaaggattcagaggtacggccttttggaggcagtgtgtcactggggacatgctttgaaattctaaaagttgaagccatctccatatttctttctctctctgcctttgcttgtggactggatgtatcttctcagctactggtccagtgccaccctgcatttctgctaccatgatctcaatgtctgtgtcagggagaatctggcttcctctatccttaagagtcagagctgcaggacacctgggaaatcatcccatctggccaactcactgagtgtttggggagctgtattgaaggccaccagcccaaagccacacctctcattggccaattttaagacattaaaagatggggcaattagaaagacacccagatctgtaccttgcaggacacacagtaaagtttttctaaaacttgctaaatgattacaattgttcaaaggatattaagcatatcaggtgtaccacaccattgtatctgtatcgttcattgttacccaatgcactctgttaaggggctggttagatggctagcccaggctgctttcttgttaagtttgtgatgttagattcttttcaaagagctgtctctttgagctgagaaatatttttctaaggtgtcccagtatcctgacacttcctttgtgaagctttgggcagattgaagctgttataatacaagaaactgataatagattgttccctggggtcatcgtgctattctctaatttatagcactgtacctctggctagatttcctggagggtgacacaagagtaaggctggcaaaggcttccaaagcatgactctgatttaagtatattttccagtggaaaaagaacaatgtctgtgcataggttacagagaggacctggggctccttaccagatgtcacttccaatcctcagttgagaccttagatggaatatacattttctaaaatgtagattatgatcatttacttcctatgggcaattcagaagaaagggagataagaaaaaagagagactaagtgtcattttgctaagagtagagatgacattatttatttcaaccaaattgtggctgcacatagattaactccaaacttacacagaaaattaatttgcctttatctttactcctcatcttgtgtgtgtgtgcatgtgtacatgagtgtgtatgtgcctgtgtgtgtgtgtgtgtgtgtgtgtgtgtgtgtgtgtgtgtgtactacataggtactatatactttgagcaaacagaaaaagtagcagcaaagcatgcttgaagaaatatcagggtgggggttcgagcagcagtttcatagaaaagttgaaggcatggggattagaaatacaaggctatctttggcttcatatggagttcaagactagtcctgagatatatgagaccatagtattaaaaatcctttctattacatatggaaagaaatataataatgcataggttggggaaaatgaaagataaaaaaatagtagccagacagagtatcttttctagtttaaatttaagatattattttaaagtttagggaacatcagaataaaatcagcttcttacagtaaagtttctataacacatactcatacatcataacaggatggaatggtacaaatttgtaatttttccatagtttaaagaaaaccatttttttccacctttcatcagcagcgccagacttcacctcttggttaaaacaacaacaaaccactgttttaatacaatttgcacttgaaatggtttctgttggagaccagctttgcaaggtgggagccagtgctctgaaagagaccagccttttaatgaacaagatctgcagtgcaaattgtcctagtggtgtccttgggccatatttatgagttttcagagctgaaatcaatggcatcttcagacacacagaaaaatggaggctaaagtacagtaaaaacacataatttagagaaaagtagccacaccatatcagaaataatgagaaaacactacatctgaaagcctccagaggtctggagaaaactggattgaatgttgggaaagaccagagtggtgatggggtcggtgccctgacatccacaggaaacataacttggcaccacagttgacaaagagctttgctgagagttgagacaacacgcggtttcaacgtaaagtccttgtaactataccatctgcttaagaaagcagtaaggaaaccgagagagaaacgtttctgaagtacagttgccagcatgtgagaaacctaagcaggaagtcattggtcaccaagtcattaaaccaatagaaaaacttgtttctgactggcagtccttttggggtactaggaaaaggaaaacccagaattgctacagaacattgtttgaatagctggttgcacagaacattgagaagagcctgaaatgctaaatagacaagctcagtgacaaatgagacaccacccaatgaaacatgaagccatagggaagatgaacaggccaacaagaggcatggattggagattggaacaatctaaattacatattagatggttgcaaagagaaccggaaatgtcagaaaacagaacactggaatgtttccaggaagatttgagaaacaatcctgtgtgtcttgcaataatgcaaaatgaagatgttgcaattaaagcctcaatgaacaagctggagtaattggaggtgatgacttggtaaactgaaagactggttcagaatgttaaatagttgatatggatgtgggtaaatctgcaaagtagtgtcagagatagagaacatatactagggaactcaggagagctagggaaaccagctaggtcactgaaggaagagttgagattgtggcctagttagggtttctgttgctgtgaagagacacaattactgcagcaacacttaataaggaaatcatttaattggggctggcttacagttttagaggtttagttcattattatcatgttgggaagcataacagcatgcaggcacacatggtactgaagaaagagcagagaggtctaatctggatcctaaggcagcagaaagagagagtgttactgggtcaggcttgggcttctgacacctcaaagcccattcccattgatacgcttcccccaaaaaagccacacctcccaatagtgccactccttatgagtctatatgaacattttcattcataaaacatgctgctttagggtttgaggaagaagaaaaggagttaaatcttacatttgaaagtactaagactgctagttaaaattcatgaaactttattttttgttgtgaaatttacatgggagggcacaattgtcattccatgtgtggaagtcagaggacagcttgcaggagctggttatctccttcctccatgtagactccaggactagaactcagattgtaagtgctggcagtcatcagtattatccatggagtcatcccacagcacaaagatttctgaaaagtttaaatgtatcattaataaataaataccacaaagaaagatgagtgagagaggagaaggataccaatgacaacaaaggaaaaagagttcactgttcttttgttagctttgttttcttaaatggagactgtctcacaatatctcagatccacaggcatacagaattgagttttgtgcataagaatttgagtgttgtatgttcagggtatatacatattagtgtgctggtatgtgggctttaggcaggggtcagagcagtgtgataggggttttcctctataccaacaagccttattgtcctgagacagagtttctcactgaactagacatttgcagtttgatataagctggttggccagtgagctcttgggttcctatctccacctacagtgctggtgctaaaagcccataatagacaggccttttgagaggtagttaaggccagatatgcttgattgagcaagagcttttacccactgagccatctcgacaattccagggataatctattcttgaaagggggagctatgtccttctttgcaattacattactgataatttcagtatatatattttttaaactcccaaaccattgatgtttctcatgaattttcattagacatagggtgtattagagtctcaaagtggatgtaagaagcaacaacagactgacatactacactttccaggagttttacaaaatcgttcctttctttccactaaaatgaataaaggcaaagctggcagtgagtaggacagacacaaagagaggagtgggaatgacagacgtcgtggagcaccactcatttgaatggagtcagtgggacttagagctaggaaagtaccctatggatacaactaaagttgctgttcccaagaaatctggcagctttagagcattggacccaggccaagtaaccgcatcaaggatttcctgttcatacaccagggctagaaacacaagtgagatctaggagggcagagaaagcctgcttgcctttcaaacattctttgacttcagtgtggcactgtagcagaaggtcttgtctgtgatcagacttcaattctccaggtagcagggggccctagatgttaggcagcaagtttaaaataggaggttgaaaaaaatggaaggaaactatggagcgtgtgcttcagggagcacctgacagaaagcctggggctcaccgtgctgctctccagttccctgtcacctacatggtctcttcattcagacaagtgggaaacacacagggaaaccagaaacaatctgggaatcctaaacagtaatggacatgagctttgagagaatctaagctcaggtatattggatcaaacaaatttacactgtgaaaagacagttttctgtttaattttccaagacaacatctttctctgccttccctccaggatccaaaataactggatcaaaaacagttttcaaatcaaacatgaatactatgatttattttgaaatgataattaatggtacaaaatcaattgtattcattaaaatattagaaaactgtaaagagtgaggataaacttttttttttcctcatggctggtggattgcattagttagcacttaattactgaggttatagtttaaggaggtaaatatttgagcctttatttgaggaggtgaggttgactgataacaagttttgttacttaccaaatactaatgtgggagttaaagaaaaactcactcatgaaacaaatagcagaaaataaacaaagcaaggaagaaggagagggagaaaggaagatgtgagtaaaggaataccaaatgcaactaaaagaatggaaagggagtggagaggtggctcagtggctaagagcactgcctgttctcccagaggacctgagtttgattcccagcacccataagaaggttcacaaccatctgtaaatctagttccaaggaacctgatgcactcctctggcatctggcgtacatgaggtacacagacatatacatgcaagcaaaatatccattcccctaaaataaagttaagaatgaaaatatttaaaagaataactataatatttggatttttaagtaaagcaacacagtttaaacaaatggtgacaagataggtatggtgacataacccttaattccagctctctagaggcagaggcagggaaatctctgtgagtaggaggtgagcctggtattcatacagggtttgagcccagattggtttacatagttaaactgtgtctcaaaaactaactaaataaacaaataagtaaaatggtagacagagatttactagccaaacataatataacaaacaggaagacaaaattagcagtagtaatattgaataaattcaaaacattaaatggaaaaaattaaattacaaatattaaattggtgaaggtaatccatagatatatgttgtaataaaatccatagtaggaaaatgttggaaatttaataaaactgatatagaaagataatgaaaccactggactttaagacatctctctcaagacagttagcaaacacccaaaggaggaaaaatttcattattccttgagagaggacaaaagcgtggcactgttgcaaaattcaaactgtgccatttgccacagacttcaaatatatgtgaagaaaaatccttattggatcattatgtatacagccacaaattatttatttttttcattttttatttgaattacaaacaagattgaattacatgacaatcccagttccttctccctcccttccaaattatttatttttaatgatagaaatatggctaagcaaatatcacacacacacacacacacacacacacacacacacacacacacacacacactcactctttattcacaggacaggctatggtggttatagaaaacaagttgtacctgtataaaacaacacagtaaatttcaattatgttagtttaagatagaaaagcaaactgtaatacatgcaccactggtgctcagtctatgtatatcttcacacacacacaatctataattaatatgctacatatcgtctttattgttaaataaccttcattcaagaagcatagggggaaatcgacttctgcatgtatagtgagttttcatttttcacttctagcatgcagaccggttttaaatctaactggaaaaagtcaaatcctccaatataaaatatcatcactagctgaatcaccaaacaagacaagcaagcaaataatgacagcctcaaaaggtcaatagatcacgatgcttccttctacttgtcagatagatattgatcacctcctctgtggcaattttttctgaacatgaggacctgtctgttcctgtgacaatgatggcatagggggcattttccacaatccacagaagcgacatgaagaaaacatgggcttcaaacctttgtcaaatccagagagtagctagatcaacacaatgtcagttaattaagaaagcaaataattcagttaaataatgagcaagtgcctggattaaggaaagacaaagaaatgaccaactggtctgtggaaaggtgtttaccatcattaatcactggcaaattctgttttgtagttagaaggagtaagactaagaattctatcatataaaatgcagcaaacagtttgtatgtatgtttgaaggtcactaagagtggattgtttgtttgttttgttttgttttatttttgttttcgagacagagttttctctgtagctttggagtctgtcctggaactcgctttgtagaccaggttggcctccaatttacagagatccacctgcctctgcctcccaagtgctgggattaaagcgtgcgccgccaccacccagcaagagtggattttcaatattcttatctgacagaatgtgtgaggtgatgtgatgagcaatgagtatggtatggcactcccacgttttaatgtctatcaaagcaccaagctctacaacacaaatcacatacttaaataaaaataaaagtgaacagaatgggctggaaggcagctcagcagacaaacgggccagcatctaagcctacaatgtgagtttagtctctagaatcacaaggtagaaggagaaactgacccacacatgttgtgctgtgaccatcacacatgcctgtgcaagcctacacacacacacacacacacacacacacacacacacacacacacgtgcgcgcacgcgtgtgcaccttgatacatgtgtgcccacaagtaaatgcacatacaataaactcaataaattatatgaagtctgatggaacacataggtatttaaagttgtctactactttctgccttttatttggggtaataaaattcaaattatgcaccaggtagaataaaaatatgtaaccttggaaaatttgctctgccttttcttccttttctttctctcttgttctacatccccagaaagattagaaaagcagttctcaaccttcttaatgctgtgaccctttaatacagttcctcatgttgtagtgacctcaaccataaaattattttgttgctacttcacgacaataattttgctactgttatgaatcttaatgtaaatatctgatattcaggctatctgataaactacctagaaaggagtcaccatccacaggttgagaaccactgtattagaggctctgccaatggttcttggtggcaaagaggagggatagctagagaaagtcccatacactccttttatgcaatagctggagtcacggagatgacttcacctttaaaccaaccttgggaacttgtgtggagtttgtaactggagatagaaatcatcaataacttaatactctctgggctgcccaagcttgagaagcaagattgtaggaactgtttaatttttttaaattcaagaacagcgaaaagttagtccataaaataagcattcaaagaatatttaaaaagaaacagagaagcctcctggccatatgttccacttccattatttggattatgtgttgtatgttttccaaatgcacattttgcttttgaatttctagtccttatgaagtcaacattcttgtcttcccccttaactagaggtgtcatggccatcctctggtggagtatgactctgaatatttttgtcacagatatgaatatttgtgcaagagccttccacactgtggagaattccagagttaagagaaataacctcctgttgtcattccctttctaaatagtcctcactcagagacctgtttcagaaacctgggcttttctcatccaaattttcaagatgtgtttaaaccaaatactattccttcattattcagttactattgagtgtcttttcaactgtttgttggctttatgcaacaaagtcatcaaaattgcctcacatgatttccaaggaagttactttagaaaaatgtatttcaacttaagggctgggatatagctcaggacagagcacttgcctatcacacacaaagccctgagtgggtccaaaccccaggaacacacacacacacacacacacacacacacacacacacacacacacgtgggttatattttttccaagtacaagtttagtctttgcatttctaaatgcagagccccatgagctacacattcttgtctcctctgtccttagctagtgaggccatagtgattgatagcagctgtatttccttatctcaaaccaaagcaaatatttttaagtgcaaaggtcatatgtataagacatcttcacagggatagccttacaaaagtgagtatttaatgagtctcactaagtgatttcattcagcatatagactgatataattgggtttcatgagatccaagtttcacacttaatgaaaaacagtggcaggagatattctgggaattggggctctagctgcagacctggttgtcttgacatgttcatgagaatcatcaagataatttcaaacatctgaaaatttgcattggggcagctctgccacccctatcctctcctccagttctataaacctgttgccctaacctgcatggtggccaaagagactaaggaaaatgccgtagagaggaagcacattttctgtgagtgctctgctctcctagcacagaacaactgagtgactcttgctaaataaagaaacgaagaatccaagaacttcgagattacatccttctagttgacagtacaatctagaaatcattcaaagtgcccaagtcagacacctcttcctgcaattaccttttacaaaatgatttctatctagattttaagttccattcgtctttgaaaagatcttacttttccttactaattgttgatgataaaattgtgccaaccataattcaatagcaataaataactgtccttgcttaacattccatttgtgacttcttaaatgctaggatttgaatcttaaacttgtgcctttatcattatttatttttgtctgaaagagataacaatagaaaattaaacttgagagaaaatgataaatatcttgacacagtgctgtttttctatatttagtgtttcagtgttaatgagcagccaagaaatgatatcatttttcctttcagctgtttacctctgcaagagaacaatgcaaaacaaggcaaggctagaactagcagattacgaagccgtaagtaccaaggatgcttatagactggtatgaaatgaggagaaatcatgcctttggccatgtctgggttctctgttctttctgcatccctgaaacaactaggcttccttggatctgacagcccagtgccttggtgatccccctctttgctttctctttcccctgacattgaggacaatagaattctaaacaatacaaactcaatgtatagagaaacacatctaaagtaacttaattgtaaagattgcagataaatactatattgataatgtccaaactctgaggatgcaaaactgtttacactggggactgatttagcagaactatcagattgatgaccaccatcagataaaggcagtctcgtgtaccttgttctaatgattgctgtgttgtgataactaattcagagccctgtgcagaagtagatactgggatgcatggctcttctcagggcctgaacaaaccgattggatcagtggtgggaaggcattgctttcccatctccatagaacagcacagaaagacacagtgagtttgccttcagtacaaacaaaggaacattcagtgcttgacaactgtgtgtcctgtaaggtgattgatagtggctggtgcctgggactgtagcctggtaggtaaagtgcttgcccagcatgcacaaagttctgttttctatccccagcactacataaactggggaggtagaggtgagaggatgagaagttcaaagtcacctttggctacatggtaagctagaagccagacaggacctgcaagccccgtgattaatcgaggtcacgaagcacagttgattcagattcagagccatgtaatactttagaaaatctgaaaggaacactagactttcctcagatgttccatgtttttgttttgttttgtttttttcaggagagcctggccaggctgcagagagcgtttgccaggaagtgggagttcattttcatgcaagcagaagcacaagcaaagtgagtccttgtgagtctgtggggagatttgctcaggtgtggcctcctgtgcagaggtagcacacttaagcctgctaactcttcatgtttaccacattgacagagtggacaagaagagagacaaaattgaaaggaagattcttgatagtcaagagagagcattctgggacgtccacaggcctgtggtgagtaagctcgaaggcatgtttccatgaactcatgtcttaggtttggaaggaaagggtgccctggagcagactatgatcccctctagtctgtcccagtgtttgggtgaattagattgctgcctctgtataagatgagagttaatgcactgtatatttataaaaaggatacattttcccttgatgtggctagccagctcgctatagacatcccaggtgcctgatgctgttgtcaatacttgaaggggaaaacacacttctaacaggacagtatttattatgcttgctgtttactttttggggctttatagacaaacttagaatcaaaatgttattgctggcctttattttttctttataacttattaatgcctattgggtctcttgaaaataagaatatcatcaaattttaatcaattcacacttcctgaatttttctttttacatttgtgtgtatgtgtatgtgtgtgtgtagaaaaacttaccatgggagtctgtcctcttcatgtggagtcctgggtttgaactcacatatcaagcttgatgatgaaggcctttatgccctgaactatctcaccagtccatcaattcatacttttaatgatgcaactttgaatctatataagaaattagctcttctctctaatattgtcaactaagtgcctcactgtaacaaatatggagtgtctctaataaacttgtggaaggtgtttaccatggttataaaccttcacaagataccatatctactgtgcatgtaatccacgcaggagattcagtcagcagtattgagttcaaggccagcctaggatacatagcaagcccctttctctaaagaaacaagccaggggctagagaaatggcttggtggttatgagcctgtattgctgtcttccagaggacctggtttcagctacccatggtgggtaacacacaactgcctacaactctagccccaatgccctcttctggcctctctagaaacctgctttcacatgttcatgcatgcacacatgctcatgcatgcacatacatacacaatttgcataataagttaataatgaaagcaaacaaaagaccacatgtctagcttcattctgttttgaaaagatatctttctcttttgtgaatttccttaaatacagacaggtcactagagaatatttatataggcattactagaagaaataataggttcacagcaagaaaaagaaatcacaatgaatgacttatagatgccttaaatttttcctctcaactaccttctgagttagacaaaaatagaaggaatccagagatgtatttacaggaatatgtatttcaattcagacagcaatgcagttgtcagattttattttgaatttgttgtcatttgaactctcaagagagaagaattgagttacctgacttttctattcaaaatactcttggagtttttattacttgtggtgaagaaggaattatgagatcatgctcataattcatgaggctatgaaacagaatttctgtttccttaaagcagcctgcagactttagagataccttgctgcattagttgcttgacaacactatgtctgaatttccacagaccagctaagggaggaaggattcatggcttcaaagggttcagtctatcctgttgaggatgacatcagagaagagatttattcacttcacgtgggccaggaaacacacatggaaggaagtggtgatagatgatactcctttaaggactttctcttggtcacctacttcctccagctggactccgcttcttccagcttccacaacttccctaaacaacacccagatgctgggaagaaaacattgaaatcatgagcctgcagagggtgctaattccaataccctctgcataatgcaacataattccatgtttgattatgccctccaatttactcttttttatgccaccctgaagtcattggctccatccccctaatagagacaacaggctagtctttgtattctgttttctaaataaaaatagacttgtattgtccttgtgctttggtgagtggtattcacatgacagtcatttccagggatggacacagagatgtggcaccttcttggaaatcactgtaccttcctcttcttcatttattagtagggatggcagtggactttcacaattacaaaaagaatggaaaaaagatggtatttgaaaacagtgaataaattacatagagtcttctatcatctggaattttgctgtctacctattcatcttttctttggaaaggatggatgcatgtagctaatacatgtagcctggtactttttatattgatcaggttggcctcaaactcaaagagatccatccatctatgtctgccatcacactgctgggattaaagatgtgtgccaccttccccagccttattataactttttaaaaagctagctgaaacaacatgacacagagtataaatgtagttctttctgtagagtgctggcctaaaatggaagaaaccctgggttgaatctcagaactgaaaaaccatgcctggcagcacaagcctgtaatctcaggattcaggaggtggaagtaaaagaattaaaaattcaaggtcattactactacacaatgggctccagaggttggcctgggctgcataagattctgtttcaaaagcaaaaaattttaaatatcaaaatagggaggaaggaaaaagaagcaaagaaaaagaaaatccatgatacttggtcttaaaagcataaagataatagatatttctactacactaaaaggtcctatactcattacttcatggtagtaagacacaatctatgtcagatcattaagtaatattaattatattttcctggaatgatttacattcataagatataaaaatatctttgttttaataactggaaattgagttatatgaacaatgttgtttgttcatgcttttttatttagattagaaacaatcatattttacatatcaatcccagatccctttccctccatcttcccatgccccccactgacctcccatcccatccctttctgttcccaagggagggtgaggccttccatggtggatcatcaaagtctatcatatcatttgggacaggggctaagcccttccccagtttgttgatgttttaataaaaatatatatctagtattggtcattagaaagctgcttttttttccaacagaggggatttgtttctttggttatacctgcccgatcttgttttgatctggttccatttatttaatcaggaataggatgagcaaaaagcatccgcagctcagcatctcacagacttacagctggcttaatgtgatgttatgatacggtttgtgaattaaaacctagcaatgtaggaaacacacctaataggattttaatgtgattttttaaaccatgaggtcatccttaagtcagattagaaaaataatctgtatcttatatttaatacccttataaaataaagttagcttctctaagtgtgtcagtgtttaccctggaaaaactaaattgaggcttaatcaaggaggcagactctctacttgccaagaattctcagaaacagctcaagaacacggtgggagaaacagactagattttattatattgaagataatgtggtatttggtttctgttgtatagctgatgttataaggagctttattttactttatttttgcagtggtgctttaacctaaggtcttgccatggataagacattattgctgaactacactctcagcccatccaagccctaatacattgaaaatcactattgataagttagggtttgtaaagtcaaagatttaaaatgctgaagaaaatccattttgtagctttctgcaacattcaggagaccatgttttgaaaagagtgtaggtgatttggatttaaggcaagcagttgaatgggaaagcaacaaaacaaacaagtacacacacacacacacacacacacacacacacacacacacacacacacacacacacacacatgcacacacacacacacacacatacacacacacacacacatgcacacacacacacacacacacacacacacacacacacacacacacacacacacacacacacacacacacacgcacacgcacgcacgcacgcacgcacacacacacacacacactcatgcatacccaggcacatatacccaatccaagccaggatctgtgttcttggttttggggttcaggtttattccttttcttcatggtggattcatatgatcaatgtggaaattgctggaaaataaaactctcctggtactaaactatacaaagtaggaagagcgcattagaaatgctggttagggaacacaggggaagaaagcactcaccaggtggaggatgagcaaagtcgttttgggaggtccttccaacagtgaactagtaagaattagttgacctttctggcccttgatgttattttggagttgaattatgatagatagtcaacaaagactccataagtaaagaagtagaaatacatttctgtcaaataatcaaaataaagacagcatgttttcagtacttcctgaattcaagttaaacaaatgctaattacaaagcagtgaaaattgtttattgccttaaactttccatgcctaatgtttgctaagtcacacatgcatttgatggagacctcatttacattctacattgcacttattttaaaatttgtcatagtaaacgcatcatttgtagggacaagccagtgtcagtttagggtctgaggaattaaagaaaaggatggaaaggtggcattggccaagggctgggaagtgaattcaccttggatctgactgggtacaaggccatggcaaccaaatgtaaaactagacaaagaccttaccaatagtagcagcagggccagagttcaaagcctgtttggggtacagaatcaattttgaaattcattacaatagagatggaaaatctttggggatggcaggtcagggaggaatgttatccatttggaatgtcatggatctttctccttcctgtcttacatccccagaactccagaagaaagtactgaactttctctgtatcagtttttcttcatattgatttaagagtttagatatgcttgtttggaagtgaaactggtttgcattagcattaattatggcatcagtagcaacagttttactataaactatggcagtactggtgtttttttgactgtctgtgcatgatgtagagaagttttgtgtaatcagtcaggtgtggaggtacatgcctgtaatctcagtacttgtgggtctgaggcaggggggagtctgtgctatatagtgcggcggtgtctcaacactgtcttccaaaatggaggagaatggaggaggaagaggtggaggaggaagggcagaaggattgagaaagggaataaaggagggagggaaaaggaactcaattccctctagtatagagatataaggtgaaaaggggaggagagagagagcaacgttttctcacaagctaaactcataaataatggattgcataaaatttctcacttctactctccccccaatctcctttccatttgctctttccctgtgtcaaatactggaacttggagggaacaagtgccacggttcctattttatataggacactattcaggatatgcaaatacagctacaatggtttggctcaattaccaaatcccttctttcgtgaaagtttactaaatgcctccaagtctcagattcaccctttgaagtgtggaaaatagctgcctcccagtataccgagagcatatagcactgatggcttaggatttaccaggcacatagttattgtgctgtatgtggtagctgaagttgccttagtagtgattctttgatgaatttattcattcattccataatccattcacttattctctctctctctctctctctctctctctctctctctctctctctctctctctgtctctgagtgcaagtgtgtgtgatatttatgtttgcacaccactattctctcccatgcacaccagtgtgaaagccaagggatcaggtatcaacactagatgcctttctctgttgccccttcactgtaggttttttgagacaaggtctctaaaggaatctactgtttggttttttggatgaactgccaacaaggctctaggttctgcctgtctctggctcccaatactgggttatagatgtgtgccaccatgcccagtttttatgtggggttctgaactggggtcctcatgcttgctgtgagtgctttactcaccgtggagattattgttgattttcaatctgatagcatatgaaatcacctaggagacaagccaacagacacacctgtgagagaacatctagattaggttaacttctgggcctggttttaagggattaccttgattcatttaattgatataggaagagctatgaatatgtaagagatatcatttctcaagaaataacatcatggattattttcttcttcctgaatgccaagaccatgtgactagctgcttcaagttccctgtcccacaggcttcctcaccaaaaaggactatacatgcccacagactgagagataaataaaagcttccttctttaaacctcttttattgagccttttatcacagcaactagaaatgtcactaatatacacactgagccctctccccagtcagtattaatgctttgagatgacaagaagacacagagggcatcagggagtgtagaaaagttctcagggaagaaatttttggaaattgggagatctagagttaacatttagaatttgaatatgtctgtcatctgtatgctgctgcatattaaaatacccccaaatgcagcagcaagagacagcaaataggattgggtgactactttatgtagcttctgatgctcttaagtccaggagtgacttcttagattgttatgcttcaagatgtctcatgacgtgtctgtcaaatcacctgaagtgacagtcatcagaaatgatagtcttgaattgatggtgattgaaagaagatgaccacagaggcctcttcaattgagggtcccagacagtttctccacatcatccccaaatagtcagcccctatgtaaagcctcatttgactacatttgactatagtgatggcatgctaaaatgtcttccatggtctctaagtatcattgatcaatacaagtacaatcactagagaacaaagtaggtctcaggaacatctggatagatggaaacattctggaaaattcagtaggtaaagaaaattctagttctccatgagcagaatctttttcactactggtgatccatgcaaatgctgggggtggggttcccgttcctcagcatgaggggaaggaaagtcagtagaggtgggattgggagttgtacacttgtcaaagcctttccaggtgatttctctgccaaaccttctgaagaatgtagaggaattctataaataaaaaaactgcctcccactgcccactcttgtttacattttctctatgttaacctgaatgactttaaggcagagctatgagttcccttcataatagggacaaaacttgaacccaccaggtgaccataagggcacgtgatctttacttggaggaatgaaatgatggacatgaggtgatgactgccccttaaaagacagactgcctcactggtcctgtattctggccatgaacacacctgtgcactcactggacatatttctgagttaatgcgtgttatgataaatctttctgccacatgcttgagttctgcccaccacatgggtggccaaaataatgcacagagacttatattaggtacaaatgctgcttggccaatgacaaggatttctcatttgctagctcagtcttaattaccataaatctatatattttataaaacttatcttattgtatgccagtggcaagcatcttgggttcctgggctcatatggtgactctagaggaagacagaaggggcccacttcctttttgcccttgtttatatattattatccctgctatgtcacttcccacctggatcaccatgtccttgctacatttcccagaatcctttttgactcctagacctgcctaacttgctgcctcattggccaaacagaactttatttgtcatccaataagacaaacacatacacagaagcacttccccatcaaatgagtgaattaatcatacctgctctcctttactcctacacacattctttcagatgattaaacatgcatgttgactcagttttgaaagcacatacagcgactggtaagacaatgggtaaaggtatgggctaccaagcctgatgacctgagtcaaatcctcaggacctacatgggagaaatagagaagtgattctcacaaattatcctctgacttccacacatgccccatggcatgcacaggtccttcatacaaataaataagtatagtaaaaacacatccatgttattgtcttaagctctgatttttgagtcaacctggatatcagtggccagttcagaatcaacaagttatcctaaaagtggctgatctggtcagaatattcccagatcacttgtagggagaaaccctgattacaggtaccgctgatcacaccacaattactggatattattaaattgaaccagatataagatggatgcctcctggattttctctctgcaaaatgcataatagcaacttgtgcataatagttatcatgtcctgttagcaatatctagcaataagagcttttttgtaaccattatgtcactcattctttgctgtataaccttgtagtgtgacagttgtccttaatttaccaagcaagactcttgagctggctgttctaggactaagagaaactcataattgtaagtaaaataccagatttctgctccaaaatccatgtaacctgcattgacaagttttgcgctctcatcaagcacaaatagtttttactttgtagcagtgaaacatgctgcagtcattagttgaactttgcatttcttacatgcttcctgtatcttggaagtcaggtaactccctgatggagggcaacacctaccaattgtcacatctctgagtggctgcaaattatcaccagccatgctaggctgctgggaaagaattacagtttgtgatatgacatgtacaaatgacaggtataaatatttcctgaaaactgtgactaccctgggcttggaatggaaaacacaatactccatatattgcaaggcagttgccttttaatcctatctgttaggtgcaatttaaacacacagtttcaactgttcattcgaaacttagcaacacaactttggtgtgttccataaaattttctctgaggtgttccaattataaccttttctttgtcagttttgcagcatacatgggcaataattcaggttgaagatgaaatgatagggtcttatatctttaatggccaaattggccaaggggggctttctctatcaatggtccatgttctcattcttgaagtcttcagctgttagagaaaaaccgaaagatgtgttggtccaaactttaatctttcttttgttccatagaaaaagaacagctcttctgcctattattcacatctgttcttttggatcaaaaaaaatattttgacagtatggctatcatgagcctttatgagtaaatctgtctttttattttttttttttgtctccctggctacatcttttgtcttgtgtgctctttctatccctgaatagatttcaagatatggtgtcctattattatgtaatatctgatgctatttatgtgatccaggggtagagcgagaataaaaaccacttccctgttattaagttgtgtctctctagtctgcagattggcaacttttcaagatgatatgcccagatttctagtctgtttcttctgaaagggtgaaaatgtggatagtgattggaattatattggtagaagtccctgagggttaacagctaagtcccaggaagggagccagaggaaaacactgcccttaagcaccagtgttaacttacagagccttggggttaaagaggctgtgggactcctttgaactactttgtaactgtttctgaagtcatatcaaagatagaaatatatacgcatataggcagaggaatgcactctctaaagagaaggctgagtaggcacagtggctctatatgctgatgacccaacagggccatgtgactcccatctggggcctggatgttttcttcagttcatttactacccctcaccccattcccaaattgtatctttcttaggaggaggaaaggaaagaaagacagcctgtgctctcttaacctgacagcaaacatcttcaaatgagtgtcatttttcttcagaaaacaaatccaattttagcgcaatctaagtaagaaaaaatactctctattccaatccagagatctccaaatttctctttggttttgctttttccccctctcaaaactttcatgtacctactcaacaatggaaagaactggtcactctagcatgaattatactttatcatcagaaactccacacacacacacacacacacacacacacacacacacacacacacacacacacacacacacacacacacacacacacacacacacacacacctttgccttacatgttctcagtggttattagaagaatcagcacaggggaatgaaatgtggaaagtgccaggaggagtaggaaacttaagcactgagggtgtgtcttggttatagtgtgactgtctatcatgtgcaaggactgggggtcgatttccactatgttgtctaattctgcatctgggttgcaatgaaggacattaatgccaactgaactttactttctggctcctttgccacctcagcttgtttcttgttgagtctttaaacctcatacattttgagtgggggagaaatggctactagagtttggggtgggggaaaagtgtcactaagctgctatttgtcaaaaaaactttgctgaccacactttgaacatcatttcatataagaagtctggtgttggctgggtggtggtggcacatgcctttaatcccagcacccaggcagaggcaggcggatctctgtaagttcaaagaccagcctggtgtacaagagctagttccaggacagcctccaaagccacagagaaaccctgtctcaacccccccccccaaagaacaaaaaacaaaaacaagaagtctgttgttatcactctaaagcctggataagacaccagttcttccaagcactgttagtattttgtagtcaagtttttgtgtttctcatgaatgattgttgagattgttctagtttctcttctattatgataaaatgtctcgaccaagggcaacatacaggataaaggtttattttggttttcacttctgaattacaatcttgttagtttagggaattcaaggtagtagaagtcagatcatcatgtcacatccagtcatgatcagagagaagaggagtcatgcttgttttcttttttgtttttttgagacagggtttctctgtgtagctttggagcctatcctggcactcgctctggagaccaggctggcctcgaactcacagagatccgcctgcctctgcctcctgagtgctggtattaaaggcatgcgacaccaatgcccagcattttttttatgcttgttttcttgtttgcttacttgcagctctgtttccccactcttccatactgcagaaccctctgactagggagtggtgcttcccaaactggactgggtcttcacacataaattaattaagacaccctcacgttgatgtggctataggccagccagatgcagacattcccttattgagactttcttctcaggtgactttaccctgtgtcaagtagccaactgaaactattcttcacaaacatcttaaaaagtgacacagtcacttgaagaagtgacttggtggaatgttctctgcatcctttagtttgtgacagataagtaaattttaaaggaaaatacatatcaagcatttgagttcaggttagatgagtctcatagtgagggttatcaaaagaaatcattagcctgtgaagccaatatctcccttccactccaatgtataaatctgttatattgtgcttcagggaaattagatttgtagtggctaacctatgtacttggtagaatgcttgtaaaaatcaagttgaaaaatagaaatgcttggcagttatcttacttagggtaactatgactgtgagcaaacaccgtgaccaaaagggtttgtttattcagattacacttccacatcacagttcatcatcaaaggaagtcagacatctctaataattatggaacttaccatttcctcttgtagaaatcagatttgatgcaacggaattggtctttggattgtgtcgagctttacagagatctttcttgctagactcaagtgtacaatacactctgttcatatgttccatagaggaaccattacagcctctatgcttgtgtgccccactcccaagatcatctgttgaaatcctatcctcttaggtgaatgcgttagtgggtatatcatgggggtattgaccacattaaagggtccaggagaagccccttacctctccactatgctggggcacaggaaaacttcactctcatcaggacatagtggttcatcgacactaggatagagtttgagaccaatctggtatccacaggggaagacctcggctatgacccactctgtgaatcacaaagcaggttcttgggctaatgcctcctctgagtcttcccagtctgcagaactgtgtataacactctgctgttgtttagaaaccttccagtttgttccatttgttgtagcagtccaaacaggacaaggcagagaggtagacctctttttacttttggagcctctagagtccccagtaattgaagatgattggttccaaggctgctgttataaatgaaggtttatttcagcatatgatagtgttgacacttaacaatttctagatgtcatgtgtttaatcattatcacggtcattatgagccttttgaatggactgagagcaaacagaaggggttttgtttgggtctattcagggccctacagcacacaatttaatcaccaacacaagcatcagtctctttgaaattaaaagttatcttcatccattcggtaattgatccacttctcactttctatagaacctatcttttatactgggtaaatttttgttgtcttcaaagagatcatccaaattttaccttaatttctacattcataagataagggtaaaagtcaaacatcttaggatgttcaatggtgtaaaagcccatggaccaaaaattctaaaatcctgcatgcttctccccatgcagagagtaatataacagatggaccagatagtgtaaatgaaatcacaattcattgaaggctgagggtctcatagccatatcaggacacagggtaaattgagacgcacattttaagccttgaaaataagtgggaccattttaccctttcaattggaaaagtttgcatttttctacacagaaactagtcttttaaattaaacaacaaggtagaaatcaaaggtgattggttacaggtgtgcttggctggccaattgtcagagtttggagttgaactctcaatcttccttcccaaattctaggattacagagaggtactaccaccactccaggttgtgagctttctttgttatttttgttgctgtttagcagtttcttattttagaatattttaagattcacagtaaaatatttttaaaaattgaagaattcctatctaacccctgttcccacagatatattgtatcccctttatcacatgtgccaccagagaggtgttagaacacatggatgtatgttggtaaatcatcatccccagaacccacactttaaattcaggttcctcttgtagatgtaaaattctatgggctttggcaaatatataatgatatgtattcattatttggtatcatacagagtagttttactacaacacaaaatttttctgtgttggcttatccgtcctccctcccctatccttcacaaccactgatacgcttgtggatcatttagaacattgtctggccattgcacaacagctctcaggatggaatatgaagagagctattttccattcctttctttcaccgtcactcagcaatgcaagctgtcctgagttcttgaagacttatcttttaccatagctaaccagactctgtcatgtgggctgtggatctagcttcatggtggagcatgtgtatagctgcggtgagtccctgggttccattcccggcaccacacaaataaatgaataactaaataaatgtaagcattctacgaaaggtactaattaactcagtggccttggagtctcttaaaaaatgcatcaataatggaactaagaattgctgtttctgttttatgtctcatgggatacataaggatcaaggacaacatgattttgttggggtaaaacaaaattgctttctctctctctctctctctctctctctctctctctctctctctctctctcaatcaccacgtgtgtgcatgtgtactttgctgggaagaacaaacagtgcataagaatgggactaaaaaatattctgcggtatcacgcactgtgtcaacataggcattgcgctattgcattgtgatgatttcatgtctgtcagatctgtgaggtggtcattgggaagctgatcatgctgctatgttggggtctcactgctcatcatcccaatctgccacctaattagatgcaggggaaatagtccttgagcaaataaaagaatgccagaaatgatgttcagtgtttcactcaccccagtgcctgacttctggaagtgatcggcttttaatcaaggtcttggggacttgcaggagtcccaggcaactttgcaagaatcacttttgtcccgcgcgattgtcttgtcggcaagaacaacacaggacactcggatccttctgcagtaaagctttaatgcctcttgagaggaagagcataagcttacaaaagcggagacccggagccaagaatcccgtcccctaataaaggctggcaaccgccgccttggacgtgttacccatgattggctgtagctcatcggaccatatgacgccacgaggcagagatcaaggaatggaaagttacccagtgcctgcgcgcattaactttacattcggtgcctgccggatgcaggcaccatcttgtaatggagaatgcagggacggcttcctacacagtttcacctttcactgacagaaaggggagggggacattagaaatagcaggagcttgcagagctcaccgagacagctatcccaggtcttgtgaagttttcatatcaaccatttagctgttaatgataaattctgagtaggcagatttcatttgcctgagatgggagctgggttataaaacacaaatccatccctggatttggcctctaataatgtttgcttttacaattagttctcttttttaatctgttagtgttttaccaatccgcttgagtaggagttctagatatctgttaatagttcattaatcacattcgagagatcatcatctttgaaactccaggatgggaattttaattctcttctggactgccagtcaggcctgtgcctatgggagagagtgcttcccacttcacgccttcgttggctgacacagtttctgaggccatttgctaatcatcccacttgatgtgaagtcaatttgatttagaatcctggctttcaatgaaagcaactgtagagttcaagcaattcaggctctgcacatgtgtaaaataagcatttctgttttttatgactgctctcatttcctcagaggcccttttggaggatgagtttggacatgggccctgtgagctgccatatttaatatacaggtgtggctcacctggccatgtggggtgacaatcacaatttctgtttcctcagtttcccctgctgctattcaacactggtttgggaggagagtttaggctaagaggttttatctgtcttatctcacatagtggtaaatgaggccaagcagcagcagggcacctggaaccgtgtcgattcttgcttgggacaggttgccaggctagtcctcactgacagtcctcactgatggagtctgtcctccagacatgtgttctcattatgcaatccatgcatattgtgacatttgtttcaacttcaagttcctgtccacctgccagtctcagcatctcttgtactttttagtgtgaagatctgtaagaaatgtgtcatgtcttgcctcaggcttttcctgctgttttacttttcaggatttattttattttcattgtggtggtgggtatgtgcctttgagtgcaggtgcctccggcggaggctagaaccatcagctctccctagagctggagttacaggtaaatgtgcacctcctgatatgggtgctgggaacagaattctagtcctctgtagtatcagtgcatgctcttaaccacttaggcatctctccaggcccgactcttctttcttgccattgctcatgtgatgttaagtattcatggagactgtgttccttataaggcttctgctggcctcccaggacaaaccggctcttgggaaccacacttgttttgatggatctgtactccctgacactccttttagattcctttcccatggaagggagatgccgtgttttccttttcatgggaatcatgtgttgtcactcacagcatataatgtaaggaaaccatttgtgatctccctgacacttgatcaatatcaatatatcggtagacatttaaagaatgctggacctcttctttaacgactcagctcatgaaggatgaccacaaggcactagaaagtggatgagaaatgaaaacacactgctttaattttctaaagcatcttggttacaagtagatcaatggttgttaagtctgcctaatgttaaaaatattaaaatcagcaggcctttttgtttctaagaggttaaggtttatacaccacacatactggttagcctggtgctgagagtaagtagtttaagcaaattgttgagtctccataaattactccatagccagtgctctttcttcttcatatactgttgattgattgattgattgattgattgtgtgtgtgtgtgtgtgtgtgtgtgtgtgtgtgtgtatgtttgtgtgtgtttgtgtgtgtatgtttgtgtgtgtgtgtgtgtgtgtgtgtgcccatgccagtgcataaatgtgaaggtcagaggataacttccttgtaatgactcagatctctccttccaacatgtgaattacaaggaactgaacttgggtcattagccttgcaggtctgtgtgtttccccattgaggcacctcaaatcactgacccctaacactttaaatttttattctgaagtaggtaacacagggaaacatgtatttctttttttctctagatttttttaatttaaattagaaacaatcccagttccctcttcctcccatcctcccatgccccccaccaatcccatcccctttctaatccccagggagggtgagggcttccatgagggaatcatcaaagtctgtcacatcatttgggacagggcctaggccctgcctggtgcgtccaggctgagggagaatgggctcccaaagtccatctgtacactagggataaatgctgcagaatcatgcgtttcattcagtgtttgtagtgttgtatgtgaatatgtttgtgtttaatgtagactttcttaaagaataatgaattactttcttctacctccttgtgtatttctgccttgtggtgggatcttcacaatcctgagctgttggagaggacaccctgagaatggctcaagttccccatcactcacaatgaggcgttgctactcatcagccataatggggagaaacacagtcctttctgtccagtcccaactccacactcagagtgtccctggggtcacttttgcagtcatttaaagtgtgtaagagggaaaaaagtgaatatttgcccagacacatacaacttgaatttttaatttaacaccagatctgcctaaatactgaaccccaaacttcaagggatggaaacacaacccaccgaagcaaacttctctcctgggtctaagattctctgcacctctgaaactccttttttcactggctcttgcttctcagcctgtgcctgaaaccaccccagggctgctgtgggagaggactcctcattcatactctgccttgcatcttccctcccacttcccctctcatcctccaaataaaaaagaagttcgagtctatttgtttctgtgcagttgaaccataattctgtccaaatgagacttcaggcatgtcaggagaccagcagcaggtagcccacactcctttcaacttcccgttttgaaggaatttacaaacctaagagaaaaggaaaagaaagtcagaaacctagaggaaaattacagtatgtagacttcctgtttctgaccttaccttctccatagaaagcaggtattcccaggtaacagatttcttaataactatcaaaagcaattcagtttggaatttatactggctcaactgaatgctatgttagttgtgcaccttgggggaaaataagtaccactaaaaagcagcctaaggaaggtacatgtgccttgagggatgctggtatgccctgtgggaagctgtgcatggacatcaaggaagagcatcacactattcttcctggacatccttgtcccgacaattcagtttgagccactatggatacctgcttcctatatcaagcccaagtccttgttcattgatgtctctaaaagttgtttgaggctctggagacatttgccaagaggaaaatgctgcaggatactttcttactggttgctgcttatcttggaggcaatgcatgtgacctgatcatggtggcatttgctcaagctctgcaaagcaattcattaatgatacccttctagcaccagcacacctaaaactcgatttgtcttttttcttcatttccagcctggatgtgtaaataccacagaagtggacattaagaagtcatcccgaatgagaaacccacacaaaacacgcaaggtaaatggatgtgtgtcctgtggtcttgctgcatcccagaaaaccctcctctggtgtcacaagcatgctttaccctggggttctatcctagcaattccttttctggagtgatgtaagcagtatatagcttacatgacaaactaaagtaccttctaccagagtttgccatggagaaccaaccaatcttttgggcatcctcacggaaggtacttgcaggagtataagggaccccaaatatagctgctctggaaagtcttctacccagtatggatgacagctttcccatgactacatagatggagttcccctctcagttagttttcccagactggatactcttgcatctttcaagaccctgagtccaagtgcagtgagggtgaattgcttacaaatggctgagtgtgcaggagggaatctcagacaagggtccagtgactctccttacccccactttctctgagggaactcaatagccaacaggcccatggaatggtctcttgcaagtggccacctctgagcttatgtcaatggctgctgtttttcttggagggccttgctctacaacacattagagggtgatgccatgggactgtgacaggaggtaggaagaaagctggtacaatttattccccatcacagaacaggggtccccctggagcccaacagacaggtacaggagatggagatgtctggggaaagatgatatcaataaaaatacagtgtttacaggggaaattctaagggaaatctaaaatatgaataactacagaaagagtagaggtcttcctcttaacatcagcatttttgggacacaaccacagggatgggcagcttcctccagtctgctccaagagaatgcctcaagacaaaagctcccttgattatgtagcattggggcctatgcatccatttgaatatattaaatatatattggtttgcattgtaacatttattatataacattatatatgataaatagcatatacatagttttgattatacaatataattgcatcacttcccccttccctatcttcctttcaaacccttccaagtctccctgtctcctgttctctttcaaatccttggtctctttttaaaaattgttgttgttgttgttgttgttgttgttgtgtgtgtgtgtgtatgtgtgtgtgtgtgtgtgcctgtgcgtttgtgtgaactccttaatataaaagttcaacctgctcagtgtgtataatttacttgtgtgtatgttttcagggctgactatttggtattggataaacaattaatgtgctcttccctgggaagactatttctcccactctgggaggtccatggttgcttggagttctttgtctagggtggagacctttgtgagctcccccatttccatgttagtgtgtttattggtatctttcttcaggataacagcaaacttcctgttcttcaggctcttacaatctttctgcctcctctgccacaatccctgagtcttaggtgaaggagttgtgttgcagacatattaattggcactgggctccaaagctctggattttgactggttgtagtttcctttaatgatttctatctatttcaaggagaaatatccttgataaggggtgaggattacatttatctgtatgtataagaataaatatttagaatatcgttatatttttgggtatttaccagagaagactgctcagataacaagtcacatctagctgagggcctactgacgattgaaagctactgggggaattgtttttttgtttgtttgtttgtttgttttttggtttttttgttgttatgtgagtctcatgtgtcccaggtggccttgcactcactatgtagatgatatgacttatgatccttcttccacttcctgagtgctaagatcaaggacctgtgccaccattactgattttatgcagggaagcagatgctaaaaaaaaaacactccaccactgaacatgtccagtccagtgaagaaggaactcgtgtcatttgtaaaatctctctctctttccctcctcccctccctcctctctctctctctctctctctctctctctctctctctctctctctctctctctctctcacacacacacacacacacacacacaccagtctctagccagtacaagtcattctaaacaaacaactctggggttagcatcagcattctgtaccttggtagacgttttctgttgttttaaccccatgtagctccagcattcttctaaagtgaacattcctacatgaagatgaaccaaactaagacttttttgaggcttgggaaccttatttcatgtgactttttttcttccttcaaagatcccaatatggcccgagtcctttttcttttgaggcagtttcccttaatgttaggagggggaagccataggaagagtcacaaagttcatttagatgcattgagcaaaaactttcccactaggaactctctgagataaagaataaagccatcccactacaaacctacttgtgtagatgctcctgctttctttcatctgctcccagagaacactgggctcactccactagtagagccaaacagaattcaaaagtcagtcatctctccagaaagtgcagggtgttcccacttctacctgaattattcaaaaaccccttcctgtggctgactgagatgttttccagctgggagaagaaagcagaggggtaaagaaggtgaggcttgggtgtgctgagtgaccactcatcctcttcagcactagactcagtgttgctgtgtgagctgggattccttagccttcctcccagaaagcccagagtaacaggagagctcttcacatgccatcagctcctcatatactatcatggatggcagaaacctaaggtggcatgcagtgaagtgttgtaaaaataaagaatcaatgtgtgtcaactcagtttgtctagcacacagctgggagtggtgggtattatcaccccaagtagtataactctctctctctctctctctctctctctctctctctctctctctctctctctctgtgtgtgtgtgtgtgtgtgtgtgtgtgtgtgtgtgtgttatagtaattccaggtagctataaagtaattattccctatgtatttgcaaggatccttggagatactcattcctcctccctcttctatactgcccccatcctgtatatttttgataagaagcatcatcaaatgagctttgagtgagttcactgaatatgtggaagtgtttgccttttagaaggtctcttgctatcaagggtattttgttctgacacttttctcattttaatgtagtcagtctatggtttacaaaatgacatccgaagccacagtcccacccacacacctacaccagaaaccaagcctcctacagaagacgagctgcaccaacaggtatgtatgtctgtgaaatgaccaactgagggtccgtgggacaaccatgcagagaagagaatgagcgctcactcatactgggtagaatttggaaggttatttgcatgttcaactgcttcattgagatttacaatataaaaggcaatggaagccaggcatggtggtcaatgcctgtaatcccagctttcagaggctgaatgcaggaggattagaggtctaggagagttgtgtttgagcccagattctgtctcaaagcaaattcaaaattttaaacaaagagacagaagtatagctcagatgatagtgggtttgcttggcctgtataagaccttggggtcaaatccccaaaacgactgtatctgtgcatatgtgtgccttgatctgattctaagacatgaaccttgaaacatacaatatatggaaatgttttttggaaactcttcactgatttttcgcttctttgccttcagaccatttttggaaaccaatacacctgccttagaggtgacttggccattgagagttgctctatactctaaagctgtctgagaggagaggacagcagcttagagacagtcttatttccacatgaagtgatatgatcaccacagaatgtggatgcctttgtctctgcagcattgatttctctaaccttttgaggtttgtcattatcaaccctggtgtgtcatcatcatggtctacattgttcccactaaaagtctgtttgtctccaagaaatgtttcaaagaaaatgccaaagtctcatatcaagtcatggttggcttaatcagagggctactcccctacctttgactcattttcactaatatattactgcactgtgctttatcagtaagttaacgttcacttttatgctgtataattaggaaaaagtagttcagaggcttttttcctaagttagttttattgtgtatttatatctttatgagaatgtgtcacgagctgataagatgactttcaaaatatataattttaatccttactttggatagcacaagcttgtaaaatttatcttaaaattatggtaaccaataaagctgcatttgttttatgagtgaaatatttgtagagtaattggattctgaatctagttatttgtcatgaatgtttaaaaccaccatagcacttttcaaataaagttacatttccttgaagcaaacattgtattcagatgtattgctgttctgaaattgtacttgttgggttaatatattatatattctaaccctttcaaagctttctgttttaatttttttctaccttttttccctagaacatactcagcaaggactggaatttagagtagtgagttgagttgccatgtttatgtaactgtgtcttcaactttttgtttttatagataaaatactggcaaatacagttagacagacatcgattaaaaatgtcaaaagttgctgataggtaagtattttaagataccagtatatttttatttatttaagatgtgtctatttttattttatgtgtttgtgttttgtctgcatataagtctatgcatgtgtgacttggtacccacggaggacagaaggcattgcatcccctgaaactggagtcatgaatgtttatgaggcaccatgtggtttctgggactcaaacccaggtcttctataagagcagttcttaatcactgagccatctctctagtcccatgctataaattttaaatgtcatatgacaactgtattaaagatagtatacaagggatggaggagagtggaagcaaacgttgaaacatgctggatatgttgtcttacttttgcccatgaaaaacttctgaagtctcttgtcataatttaaagacaacaaaataatgattgtcttacattccagaagtccaatccttgtagaaccaagaatcgggttaacgggagtggtttgtgcttattcctggtgggagaaatcagtcttttaacttactgcttaccttttggggtttttttattatttcaaattagaaacaagcctgcctcacatgtcaatcccttctccctcccctcctcccccaccctcaactgatatcattttttttttaaatgttagctagtgagtcctatctgtatctgagatgaaatttgactttcaatcctttctccaacttggctacaatctgctctgttatgaatgtcctggctagccaggacaggaatgaccctcaacacctactgctcaggcatagccgaccacatagtctttagtggagcattctccattattccatgctcaggctgggaggcagaatcatcatccacatctgcctgccagaaccatggtgagttgttgcatgtagattgtggaaacagaaattgccattggatttctttctggaaatgtatgtggattccatctccaaggtgtttcccttgctttgaaccaggtataccttaaagtttaaaatgaagctggaaatatttccctctgttttttccctagtctactaagctatacggaacagtatgtagagtatgacccgtttcttgtgccacctgacccttccaacccctggctgtcggatgatacgactttctgggaacttgaagcaaggtaaaactataaattcttccttctaaatatgtcagctatttaagagtgtgcatgaaatagcagagtcaagagcaggcaccttgtaaagggaatttttgcttttgctctacatcatccatgatttatcattcttagtccaaaagagattttaggcatgggcttccacactgaaatttgccctgctactagagtgctgttctgccatgagaaaggaaggagtctagtcgttagtagccgcctggattgtcactgtgttaagtgaaataagtaggctatagaaacaagagaaccacatgatgttacaaaatattaaaaaggcagaaatcggaggttaaatggtggttcacagagtctaggcaaagttgggaagaaaaagacataaggagaggttgatcaatggatattaaataagagtcccatgggatctaggaacactggtgtgctgtttgactgtagggagattgctgacatctatgtgttgtacatttgaaaactaggcaaaggaatcctgaatacttttacctcagagacttgctacttgaggagatagatgcatttaccctgattcaaatattacatgatatgcatgtttcagaatatctcatagtcatccatatatatatatatatatatatatatatatatatatatatatatgaattttatagattctaaaactttaattttagaaacaaatttacattgctgaaataactggcccaaaattagggctgacattttaaagatgggttagtcagaattcagatctttggtttttaagattcagctccttgctaataaatcttttgaaaatccatatagtcacataggcttgtgttcaggtaaaatggattccaaatccacacttaattaagcacagtgcaaacatgcctacatacactccattttataaagaaatgaattttcaccataaatgcagagaaactgatttttaaaaatccaagcacaatttagaactgcatatttctttggttagctgtgtggggcattgtggcatcaatcttgaagctcactcagaggtgatttcatgtatctttacaaaaacagaagtattcaatagcatttctgttttgttttgctttaggcagggtctcttgtagcccatgttgtccttcaacttgttatgtcactaaggatggtatccaactcctcatccttctacttcctactcctagtcactgggattacaaaccttgatatcacacatggctctaggttgtatttatgggccatttctcttttatccatccatggatcttaaacatccaccaattcagaagtcttcagtcacaagttttgtacatatatgcatacacacatacacattatatagattccactatatatatatatatatatatatatatatatatatccccattccatgaataaatatggttcatatttaattgaagcagagtcatatgtagaaatgaggccttccactttgggagcccatcccacatggagggatactccctgagcctagacacaatgggggtggcctaggccctatcccaaagaataagacagactttgaagaccacccctatggaaggcctcaccctccctggggagcagaatgggtatggaataggtagagtgttagttggggggcagggaaggaggggaaggagagggacctggtattgacatgtaaaataattttctttctaattaaatttaaaaaaacaaagagaaaaaaagcaatgaggccttccagacacaaatgcagcattctaaggatgacctacatcacagactgcaactgtataatggttgaaatagggctctgggtagcagtagctggatttgtggcccctattacttgtatgatggatcatgttataactcttaatgcatcagcttcttcatctataaaacgagaggggcaatgtcagtcttacaaagttgctaagaatccatccagactcttagttgcagattgtgttattaacctaacttatacctcactgtgatttcatgaagaatagtctatcagtgatgcattgctgttctagaaaataagctaaagatgggcattcttcttaggtatacatgataaagaaaataggaattggcccaggcatagtggcacatgtctttaatcctgtacttgggaggcagaagcaagtacatctcttgttgtaattgaagaaaagtggcactcaatagagagatgccatgcgacagggttcaagcagaggtttttttattagggaaaggatcataaaaagtggaaagggaaggaaggagaccagcctccagagacaggagcagcaacaggagagaggagagagagggagagggacagacaaacccagagagggagagaaggatgggagatgggcaggcctttttaaaagggaaagtagtgaatgtgcacagttggtgctcttagtggctgcagctgagggcacatactgttaaaagcccaaagacaggccagtatagatgcctgaatcctaacatctctgtaaattcaaggtcagtttgtgtctacacagtcagttccacgtaagccagggctacatagtgagagcctgctccaccttaaccaggcttccaaatgaaaactataataaaaagaatatatttaaccttattttttcccacagcaaagaaccaagtcaacagagagtaaaacgatggggttttggcatggatgaggcattgaaagacccagttgggagagagcagttcctgaagtttctagaatcagaattcagctcagagaatttaaggtaagacacattttgtcattatgagccaaggagccactgttttgtctagttactttagatgtaatcgatccgatctgttgctctcactggatcacaatgatgtaaacaaatttcatctctgatacctaaagatggaaggaagattgcaagacaaaagctattcagcattatcgattctttttcataatttatttttacacttccactggatttgttgactatataaatttagaatttttgaagttaactccataaagagttacgattcccagatcaatgttttgacaaaatggaaaatgtctgtattagtcagtgtacatgtcataatgtccagcagaaacgaaggaaggaagatatattttggctcacagattcagggaattttagtccttcgtggcaggaaagcatgacagagcaactcaggtcatggcagtagtagtgtatggctaaggttgatcacatcatgctgatctaggaagcagagagcatgcatgctcaaatattatatatgtgtatgtatgtgtattatgcactccttgaactgtctattatatgcctatcatgcttctttattaaatgaggctcccacagccttctgaagtagaactaccaactggggaccaggcgttcatgacatggggagcttcttaggggagcatttcagaatttaataataacaatggccaatagtacttgtacagttattttaaaactttagagtttacttatcaatgttagcttccaatgtcactactttggcaaaaaaaagagggtaagtatctcaatgatcttggagcaaaagtcaaagggaagcttttattaccgtgtgcctttggatgcagtagagctgtggaccacttctcagactttagcacagaaaagcttttgagactaacatagaaatagggtgggggcacttgttttgtccatctgtattaaacaccattctcctctgtcataatattttctaactcaaggagcacctagggaaaacttaaaatatgaggcatttgagtggttgttaatagattctgcttaaaatgatcaaagcaatatattttcactacatgatttttccccttttctggtgaggtcctccattcattgttctttgaaacctgataccctgttttttttgtttatttgtttgcttgtttgtttgtttttttccatttgtcatatcttactaggccctgtggaattcatttatagaaggatattggcaactatttcttttcatggggactaagctagcaaaggactgactatcgaattctctttaggagctaatcagaaacatgcctaaaggtggcagatgcctcagagttgaggaaggctgcctcagagtttaggaaggcgacctcaattaggactggaatcctcccattttctctgcctatcatggaattcagggtgtgctttcttgttgtcttgtggaacaaaaattctaggaatttttgttgggcttactaagtaaggtttttcaagaaaacaaacagccccactggatgctgaagccaagtccttagataagaatagagaggggtacccaacatagagccaccacagacatcttaatagctgacagaaatcagaaatagcttccaggcagagattgggtgatgagaagactattgggccaaaaaggaagagcaaagatacagcaaggtgtgcaaatcctgggcttcagggaggaacaaggtcattgccaagtctttgcttctgttacaccgttgctatttcctatgtttagtcctatgccatgctaatttccccaaagaaagattatacttaggaactattagggctgaggaaatggcccagtcagcaatgaaaatcctctgtaaggatggagacctgagtctgatgcccagaagccacgttaaaaagcaaatctgatgtgatggtgcaccacactggagtcatagtgctgcatgtgtggagacaggggatccccagggatcatcagccagctgctctccccagactagtagctccaggccaatgaaaagctttgtaaagcacttgtgcagcatatgcgaagttcaacccctggaacttggatcagagtgttgacataactcaaaaagtaaaatgctttccctcagagaaaagaaagaaccaacttccacaagcacatctacattaacacatcacacacacacacacacacaaacacacacacacacacacacacacacacacacacacacactcacacacacactcacacacacacataataaagtgaaaataaagaaaaataaagaggatggcaacccaggaaaatgtacatacaagtattaaatatgtcttatatgtgtgtatatatatatacacatgcatatgtacttcttgagttggctcttacatgcctaccgtgtttctttattacatgtagataaaccctagaaagacacagcatggaaggcattttgaggtcccaatgtatactatgtttatacatacaacttctctgagtatagtatatagtgttttgcctccattctttctgaaaaaaatatgaatcaaataatcaaaaatgtgcagtcaatgttcttgccttatttcctagataatcaaaacaaaacatgtctaagtcagatcagcatcttggacaaggtcagagtgcaggaagtgacattcttgtttcttatgagccagtatgaacctcctgccaaccattccccaatgttattgctttgtttaaaaagaagaaaagagaaatactgataagactatcagtttattataaggcccaacgtggggcgccaaaatgttattgtttgtttaaaaagaagaaaagagaagtgctgagacatgagacataagactataagtttattataaggcccggcagaatggggagactaagaagaggaacagggtaaatggctgaccgccatggccggtcgccatagagagacagagcggggaaacagagagaggggacagagagcgggaacagagcgggacagagaaacagagaaacagagagaaacagagagcataaaggggcagggacttatcttttaaaggggtcctctgcatctgtgtgcagacttagttcccatggaaccttgggctgaccagggcactgcctgagtggattccaccaggtaacaggggcaggccagcataatgcctgaacctttcacccaagtttaaaccataccctggcttccacctaagtatctctttcccacaccacagtgatccagacaacaagcagggccggatttgcagttcagtgactctcagtgcatcttatctaagcagcagcagcctctgaactagagtctagaggatctgttgtcaatgagactgccacttcagttatcaggatgggaggactcaagagttactgcttacccatctctgcttactcttcagacacaccctctgtcttctgttgcccatattttgctaaatcaatatggtaatagcatgggttaggcacataaagttgtgccaggcattttgagatgccctttatttaaactatgccttgaactagtcactagttccactggttccaagtggcacccctggtagatgtgctttttttttcatgccactgtattgatgaggaaatcaagaagtgcagatgtcagtgacttccttagactccagctgctatcaagtgaacagtgggattgaaagcggtaccctctccattttacaaagctaagccaactgtgctaacgttgatgatgagaatacagaaggtgaagctgttgttagggaaacagtgtgatgaagtggttgtgagaatgccatctgctacagattttccggagccagccttccataaatcacctagtctttgcatctttactttcctgatctctaatatggggaatgcatcacagtatgaatgttgtgaagactgcaaatactcgcaatagtaccttcacctacatatgggtgtgcatgatcacattaatccctcagcacttggctcctttacccacttttccattgaatttctgatgtcagttcaaatagaatagcttccctgaaccctctttattccatccacatgccggccactgtgtcaagactctttctggttcagcatcctcaactctctagtgtatactccctacagaaactccagtgtacttccaagcattgcagctgtttcagtatggacatttttctctgttagtgctgtgtttgaagataaagccctttctgtgttgcttcagtgaaattgagactatgcaggatcggggctttggcacatctgcttttaataaaagccactgaaaaccagtgatttccaatccctccttctgaagcactttttgaatactggggaaggaaaagcattaaaatcagaagtttaaggtcatctctagcaacataggaaagtcaagaacggcctgagctacaggagaccctatctttaaaagtaaaaaataaaactaacaaaaaataatttgatgcctttgaatatgactcttgaaaaataaaaagacagctagcaggggagtgatgttggaatctgcagagaaagttaagcttgctagagtagtgagaggacattacaaggatggccaggtatgcctgtggggctcacaggtgctgtggtgttttgtaggttctggctggcggtggaggacctgaagaaaaggcctatccgagaagtaccctctcgggtgcaggaaatatggcaagaatttctggctcctggggcccccagtgccattaacttggattctaagagttatgataaaaccacacagaatgtgaaggaaccaggacgatacacatttgaagatgctcaggtcagtacatggtctaacctctcagcatgaggccaacagctctctgcagtatttaaagttcagtttaaaactggacataaacccaggttcatttcctgaggacagaacaaagacatttcagattaagtcatcttttaaacccctgggaatatttgtttgttttggttttttgagacagggtttctctgtgtacctttgtagaccaggctggccttgaacttacagagatccacctgtctctgcctctcaagtgctgggattaaaggcatgtgcagccatcacccggcaactttttaaaatataaatttagtgtttattcacgagaatttcatgggccatccaggatactctcacatcatgcataactgtacaactaactgaggtttcactagatttggaaggcaatggaacatgtaagttcccttaaagtgctggaacaagagcagaacttcccacgtttggatcaagttgcagttaaatgaacatattgttttctttgcttgacttcttcatccatcagcagccatttgtagaatgcaagagcagctaaggtgtagctcatcagtagaacacttatctaaaatgcatgaggctcgatcctcagttcaaagggtagggaacagtgagaaccctgcacacttattagggacaggtgactaacatcaccatataagaaaaaaagcacagggatttggaaatttgtcatttaactaacccaacaagaaatttcagacctgagctttgagctaaagtaggtatagaagataatttatcatggattggtcccaagagtgagatctatccaggctgcctggctctcccagaagctataggtgccagggcctccaggatgactatacagtctcgatgtcacatcattcactttggccttggaatcattttcaaggaaacagatttatttcatttctcaaatgttccacataaattgtcacattgatttcaagttatttcaaatgtccccttgactaaattctattattaaagagaccacatatagtttctccctctgaatagctcaatgcaaacattgatctgggaaagaaacgatggactggaagatccaaatgtcctataaacataaggtgttcttatcagcactacatttggtattcttagctacttgtgcatttgttctttagatacccgagggtcctcaagtgcttcattcttctattgaattgataaaggagcccctcacgcattctttctttccaggagcacatttacaagctgatgaagagcgactcatacccccgctttataagatctagtgcctaccaggaacttctacaggcaaagagaaaggtactggttctttgtgacctctcttgaccttagttcctagttaaaattaataagagtaaatgtctctgcggggccagggtttcaatcaaagggtaagtatccactctctaagacctccccccccaactcctccatttctaagggccatttaagttggttttgtttctgtttgttgattgctctgtgtatcatttttcagttgcttttgcagatgtccatgctttacaaaggctattagaagttttcatgtttaatgttcatctttaatattcctagttaaagggaatgaaaactccaatcaggaaaaaagtcaagtgctgaaacttgaagacagttttgtttatttacaatggtagctgtatgtttgtagggagacataaacctgagtttttcaaagatagctgctaaagagcagtcatgttggcagatgaatatttttcatctgacttacatcccaaactacttagtatcttgataacctatttcaatctaagatgataagcaagcacatttgggtagtagtagtagtagatttcataagttaattaatatttgtaatcaaagtctcattgtacataaatccctcatatgaccagtgtaacattaattgtaaaatctgtagagaaaaatcaactttatttgtaatttttaatgttaagtagccatggattcttaaaattctaaaattaagagatggttctgttaatttatcattcaaactaatgtgatatttttataacccatggccattacagataaaaatagttgcaaggggctatactgctcagagtggcaattgttaatgtttaaaattagttttaattaaatgaaactgcacagatttctagccaactgatacaagtttgaagatactcaggtcagtacatgtctaacctctgaaagctgctggcagctctctgcagtgtttaaagttcaggtttaattattcataaaataagtttcattgactgaggacagaacaaagacatttcaaagtaagtcatcttttaaacccctgggaaagccctcagtcaccacaactagaagctctaataagagacagaatcaggtgggatatccatccttgcagcaaagtctagcctaaggaagctctcatcgaattaatgttatcaacagaaacacaaccttcatgggatattagcagttgattctaaagaaattccactagatttccagacatttaggctttgcaaatatcagcataaaagctaccacatcttaatttctgcttgatttttgctttaaaccacaccattttgtttgctcaagtatgaattttgggttttatgatgaaattgcccacaaacaaaaaacttggatccagtgatgagaagtcccccttggcagccccactgccatgtgggcatgagtttcatacatgggctcagtgtagcattactttaccatcctgtcttttttctgttctgtttttcttgcctttttttttttttaatgttcccttgtctcccttcaccctaccccacaccacacatttaagtctggaaactcaatggatcgcagaacatcttttgagaaatttgcacagaatgtggtaagttttgctttttgagtaattgcaagtcgttatctccaatgaaaatttccctagtattagtcccattgcacaccttgcattctttgacaccaaaagtattgtctttatttaaacccataatcctgcttcctacttatctctttccccaaccctttatagagtagaaaaaaaaaagctgtcatgcaggaacaaccacatgagctgaactaaggtttggaaagaaatgtatagcatgatatatacaatgaaggaataagttcttctttgtgtctgtgttccatgtaccttttccttattaatgatagttgcatgcatttctttgctattgccctcagctcttcattatgcctaaaaatgaagacaatgaaagctctcttctttcagtctttgagaggagaaaatggtcaattgagcagtttaaagccaagtgactattggtagcaagccagtctccctacccttaaaaagacgcaccagcgtcctgctcttattctttatttcccataaatgtgttggaaattgttgcattaatctaagaaactagtagctttcctctcagaatgttcttagccttttgccatgtgttttggtgatatatatatttgtttgttggattctcttgttttttttttattttattttcatttttttgtactgtgccaacgcctttggaactttctgacattgtgtaagctcaaactaaagacttcaacacatttatttttatagggcagaaacctccctattttcccatgccataaaaactgtacaccaacactgagggccagcactaacctgttatgaaaagaggtagaacaatcttggtttctactcgagttttgtctgcatcatctgtggagtcgtgtggttagctccatgctgctctttgtgtgtgtacgtgtgtgtgctgtggcttttgttgtgatggtcaacttaagtggagttatgtgtgctgagatataagcaacctgaattcaacaaactcaatgtttgttttcagtttccttcaagggttcaccaccatgggaaatgctagtccactctacatctggtaggactgcacaaagcatttgaaagactttaaacagctacctagactttgaaaggtcaatgtgattgcatcaattaagagggaagagcaagaaaaatttcaaaaattaatcacattacacacttcacaaagctttggctatctttattggaatctctgttcttaacatagggtttccttttaaaaatgtctgagaagtcacaatggagaaagacaatgacaaactatcgccctaagatttttactgggaaaagaagccacaatatatcatcaggtactctgtgtaccactaaagaattatttaaagttaatctttttctaatgtaatgtggaaggaatattgtttctctttattgtagtggaagtttctgtgacagaatttaaaatactaatgtgacttgggagagatggaagagagaagtaaattttttttcctccaactccaacccatatctgacccactttcacacttctaaaatagtactgcatggtccatactgggcaccttaagaaaaaaactaataagaaacaaggggaagctgggcttgatcagctcttccttccaaaatttatacagttgcccacttagttgcaaacacattgctttatcttgggaatctgtacaaggaatagagtttagccaaaagtgccttgtggtataaatgccaatgtgtgaggagaaagatgaacacctagtatttggtgctaaggagaaagagaaggctatgtgtgtgcagttgtaggattctcagaaggaatggcatttaactgtttaactagttaaataggacttcactagccaagatgggccaaaccttctttaaaagggagaaggaagtcagaaaggctaaagaaaaggtgaaattctctctctcccctctgcctctctctctgtcttacacacatatacacacacacacacagagttacatataaaacatactaattactttcagaaagccctcagatagcattagttcttttccatctgagaaaataaaacacaacatttttatcgtttggatgtttataaatattatgtttggtgtcactgtgaagaaatcattaaggaaattaaagatctcacaatgaatccagggtgagtttaggcccagtggctgtattgggggatcacaaaagttgacatgctaagttttagtagagaccattataggatcaataaaataatttcaacacaagtaaaaataagaggtgtgattataagacatatagggacatattagaggaaaggtcaagtttgcataagcatttcaatggagccctagatgaaggtggctgtggtagagcaggaaggttacatgaaggacagtgtgcacagcagagtggaacagagaaaacacacaccaataggtctcactgtgaacctggggaaatgagatgacaacacccattactgattacttgctatgcaacaagctctatatcaagaatgttgtgttatgtaaattaatctgaccctaaaaggtgggagttatagtgcatattcattcacccattttataggtgaaaaataattgggggatgcatcttcaaagaatataattttcccagaatcacacagcgagggagctggctgtgaccaaaaccttatttcctatttgccatcaagtcacagccgcctctccaacccggaccacttcaggtcaatgctgattttagggagttcagtttctgtgtttccaaatagcacatttgtaacctgggtgataagaacagaatcacgtttttttttttttttttctcagcccagagtcagtgtttttgtagccagaatttaccaaagccaagggaacattcattagtcctctgacctaccaatcaccacctccttgcccccacccacgaagtacattagaggaccttcgtaacagcagagttgcatggtagcttcagtgttcccaggacatctcttctccattatatgtttgtttgttgtctgtatgctcaacaatcccaggatgctttggggctggtggtacctttctttctcggtaaggccacttcccagcatcactgatggctgagtgttatagccagggttgaaagcagaatgtgcttactgaaacttactactctctacaaactgcctttgttctttcccctaagccccaaacaggtgatatgagtataattcacatttgtgcaatgtcttcgcactggcttgtctcaagggaaaaataaaacaacctaattatcagtgacacacacttttgtttctctatttctcttacttagcattagagaaatttcattaaggtccgtctttccacggccactgtgtcctttcatgccctcaagtgtcattcatactaagttggcttcgttctcctctcctatggagcctgtgttttactgagtgtgaaaatggtttccttcctctttcaccatcaagtgcatcaccgtttctccatctttttaactgccacaatgcctatttaccacaggaacctcacagaagaacagataggacataaggtgcaaacagtgcatgaggattgatcagccatgccatctgtcaaggttcataaatcaaatactgatgactcatctctcccttgattgtgtgaagaggaaattgaatcagcttggctttgagttaggaaagtaggaactggagaaatgagtactaggggatgctatgatgagttcccaggaattcagtaagcaaacttctttttgcagaagagtcttgttctgttccagtgaatacagttatctttagagcctttcaaagaatcagtagaaaagctagaaaggtccactgaggcacactgtgccctctttctggcctacttgtactaagttgaagcatcaagctttgtcatcaccttctggataattattgccagaactgatttgtattctttgattttagtgttagggcctcaaacatactgattaatactataccactgagataaccacccagttcccactttatgaaagttttcacaagtgcctaggttggctgggaaaggagtaggtctttctgaacaaatcttcactaacagagtaacttagtagtttaagtcctgataggacaaaatacaaacaccgaacattaaacaatgagaaacattcaaaacttaattactcttaaaatattcttttttacttaagcaaataaatttgttttctttgtcggtttttacacagggattcccttcatagctcaaggttaccctgaactctctgcgatcttgcctttatctcctgagtgatagagtatcagtggttcaccaccacactcagttgcaatgaaactatttagttttatggagaatcttcgtttagtgatgaaatgttctttagccctagagttcaccaggcttatttacagtccagcataaagtctatttctgtatcttatcctgtgagttttagcaatcatttcaactgctcgactccagcttccccaactatatatctcactaccccagatcagttcttcccttatttggtcatagctattaaacacatcaaaatatggtggatatccttcaacttagttatggattttcttctcttaatatacgcacttaaaaactgaactcgttgtttaattgtagtataactgtataaggactcactcactccttgttctttttttcccaactttatttatttgaattagagacaggattgttttacatgacaatcccagttcccttctcccacccgtcctcccctaccagccccccaactaaaaccttacctgtcacatatcttttctgctccccctggatggtaaggccttccatagggtgtcatcagatctcattttatcctaacacaggatgtcacatgagtgatagaaaaaggccattctggatggcaggaatagacttcttattttcctgttttccaaagccaactgtggctgagcagcaggaagtcctctaaagtacttggaaagaaatatggagtcttaccattacaaatactagaccagaaaactgacctggggatccagcatccacttctgtgttacactcatcctgtttctgtatggactcttatactagtctttagaccatttgtcaatatgtattgagtctctgttgtatggtaggccatgtgctactcctatgtactttttgaaagatagctggttagactgggatgtagctttgtgacagggcttttgcttggcatatgtcaggttctgggtgccatactcagcaccacaaaaacacttgttcaaatatagattatctcatgtatcctttctttcccttgtcatgatattatattctaccacaaagaagcagagacaaaactgtgaacattcagagaggttatcttatagattgtaggtctagcaaggaagtttcagctacattcatgaagcctatcatatctttaataaacataaacatcatcttaattaagcaggctgtttcacatgaacacgctcacagcatgcagacagactagaacggagagaccaaaaagctttatgtttcttgtctatgcccctgtacatgaactgcaaaggtttgtgcactttttttttaactctggctaatgtgctatggcttttgctgctcaggattgcaggtacattaatgtggaaaactgttagaaatccctatgacacctcgtgtgaaaaacacttatgaactggtgattggatctctccagcaaacagaaggcaaacctactcaagaatgaactactgtctcctcttccttcttttatggatcttaaacccatctctttcatcattgtgttggcagatatggctatccatcttgttttactgtaactggttgtggcaataccttgcctgagaaaatgatttcagtctccctgcagcataatataaatccattggtgaaaggtttctgaaccatgtagcctaatttagtttcgaaggggtaactttactctcccctgacagcatcattagttcagaaattgtcactcaaggttgtacaagctatgaattaggtatggtgaaggtttggctaccatgtacccactacaccactgagggctccaaggaaacacaggtgtggctgctgagcaatgtccaagttgctctacaggtgccaggagcagaatctaccagaattttctaagttctgttgagcttgaagccctgtttttgtgctgctgattgggaggcctcagagaagaccatcagagaggcttctgagataaatgtacagatcagtggtagcatgcatccggccactcctgggttcttttctctaacaaacagtagttatcccgcccctgtgctgggtaggtgctttgctctctgattgagaacacataggtaataagacatagtgcctgctctgagtaaatttataatttgtgagaaggcagagatgattcagattgtgatcatgggatatggctagcatgcatatctaaattgactctctcttcctatggaagttgattgcctagtgaacagaacaaggctcccgctggcttccttgtaagtgagtcactatgcattatccaggagcccaaggaaaacaggggaaagaaggactggagactgaggaaaaggcctgcaagatcaaaactaaaaggaggcttgaagactcaacagaatcaggccagggcaagtatggaggcttccagtgggagcacaggagaagacaatcaaggagccagactatgttctgagatctcttgggctgcaaatggtggcaatggagatgctacagagcaggggacccttctctaggatcagtggctactgttccaacatacattaggtgatcattagtagaacatgactgttcaagtaagagaaggagaggaggaagaaaatttggaacactgacatgtttactgcaacatttaaaagccacatttactggaaattcagattaaacttcaaactgtctcatttaggattcataatgtgataaagcagtcaatagtatttttcattgtcactgtttttatttggagattcttaagcttaaattgtgactctggtatgtctcaagtttcatatcatcttacacacatgctctaaattgtcactgaatgagaagaaagacccgagaatgtttgtgtgtccctaagtagttagcatcacagcaactggcaacatgctttgtagatgatcaactcagcctcagtctaaaatatgtcattaagcaaagtggcatgcaacaggattaaattcaggaaacctcatcagtgttctaaggacaatgggtgtgcatattctcttctaagtgtgtttcatgtagctgggaaaagtgtgaatagaacttaagtagatgaagataagactccgtgtgacaccaaatttcattgccactaatagtagagttagcttccaattatgccttcttatgtgactacttacttgacagttctctttcaaccaagtctcctatttctcattttctttcatccattctaaaaccacacatggggtcatatatgttcctcgacactccctatgaaacatttttcagagaagagaaaggcactttgatgctgatggaacactgtgaaagtaatttttaacattcacatcatttgtgctcattcttggagaccatttgcaatagcaagacaagagacttttttgtacaacttgcaagccttcctgtgcttggaagtattatgagtgcatctgtagccatcccactgtggtttccatatcccctggcagaccacacaaagcagcctggattgggcaagataggctatgtgcatacagactcacgttttttactgctgcaccgctttgtttgccaggggtcatggtctaagtaacatggagaatattagacgatccctcattcaatcattatccctgtgacttaaactagtgagaagcaaacaataaaacaggctatggcaattactgtacctttaaagtacaacccatcaacggttatattgtttcttggactccttgtgacaccaaatgttcagctgttatttgttttgtttctccaagccacacagacgactttgatattaaagatctttttaacttttatcttgttcatgaacaacacgcacacaaatgcacaagacattgctcagttattacaaaagggagcaataaccacccatgaacaagtaatatacatattactgtctaataagagcatgctactaataccagaaataaaataaaagtcactgggaaatctttctcttttctagttttaaattacaaatctacaagttggtttgagaagatactaaaaaagatggtggtatgatcctctcagaagggcaaaggaatttagcagaacctgttcatccagggcagtcccaagggtcttcttctctgggctcactgtgtttgctggcccctgacttccagaaacatggtacatttaggtggcagaggcatcaaatgcatctctaagagatctcccccttgtttccaagagcatccactcttctgtggtctccaagtatcacctctacttctgtttcctgtaactgagcagagcaatgcaaaccccttgtctaggtgaccacagtggtatcacttaatgccatactatatgtcagctcttcccaagtgttcttgctgtttctcttggttaaattttctaccttgctacctttcttcccaagtgttcttgctgtttctcttggttaaattttctactttgctacctttctaagtgggataccactttccacgtcctcaaattaccagtagcctagaaaatgaagattctgtgagcttgtccctcggatactgaattagagtcattctctatgtgtctctgtctctatctctgtcgctctctcctgcagggttacaagcatctctggacagtgcagtgtaaggattatcaccttagcagtattcacactttaactcttcttgccaaatatcagcacttctcacttaagctgcatcagagcccctgcaaatattcctttaacacagcttgatggaaaaccccccacccccattcaaacctctttaattgatacttgtggtgatcacactataggtgtgaaaagcatgctttgtgagcctctgccttacacaagacagtacccctcaccctctccatggatcagtgttaatcaaaaagccaatgacatagctgaaagactgctttccagttatgtgagctcaactccacaacctccattggaattgtacagaatcaagtcagttgtgtttctttttatgactattatggaatccttgcatttatatataatttattaccacataaataaagtacaaaatgtaaatatgaaatgatatttctgtgaaaactgagcagaacactttaaaagatctgataaggtaaagatacctttaaagtggtgatcggattaaatctgagtggatcttgcacaggtgggagctcccctgcttttcctttattttctcactaccttaactgctcaccgaggtttgtcccagtccatcaaaagccttcttagatcatagccaagcacaatactcaatatgtgacccaacaagagatgccactccctggatttgtcttctgaatacatttgacaatctaactggaaaactgcatcagctttttggccccaatctccaaccataaccaagtagagtcattcagtgctttaactaaaatgtttttgaaacatcgttttttctttatgagctggagttagttatgttttctacccttgtcttttgtttgtagactttttatttgctgcttattcattttaatgtaaatttgaatttcttccttcttcctgttttgccctgctattacatttcatagttcatccctgtgcttgccgtctctgtacttgtttggagtatctcttggttagtcttttgaagatgataatcacatttgcctcatgcatgcactctctctctgcatcctattaatatttcattcagactaacaatgaaaatgccctaaggtactgggaagacagcagaagctgccactctagtgaacagcacaccttggaggtggttgtttgcctagttatgaactgcatctttctctgtctcatccacagagatgccatgaaaggctgctccacgccgtacttagcccaagagcctttgtttaaagcaagctcctgtcctcaaatctggtaaaccctttctaacaactgtcaatacgcatgtccagacagagagacagctaatgtagttgatatatagggacttcttggtaaaacataaccagaagagcaatctgccattaggaaaattagcacaggattcgggcagttttaatgataaatgcaaatagtcaataaatatatgagaaaagagaaaaccaagagcccagtgttattaaaagccaaatacaaaccagaaaacaaaatagcctattgctgcaaatgggctatgtttctttctaaatgatatgtagtgttagacaagggatatgaaaacagatgctgggtatcttgatacgtacattggtagccccagctatgcgggtggttaaggtaggaggattataaattcaaggccagtctgtatcacttagtgaaatcttgtctccaaataaaataaatgaagattgtgggatgtagaattattgtacagcttgcctcgaggcatggattagagaaattgggtggtaaaagaaagggaggaaggtaaaagagaaaaggaaggaaggaaggaaggaaggaaggaaggaaggaaggaaggaaggaaggaaaaagataaaaactaggcaaacttatacattgttcctataagtataaccttttttctggaatatagtttgataaaatattctaaaagtgtccaaattctaacttaatcctaataaaacccagatgttctgacatacacaaaaaacattcatttcatcatacaattgctaaatatagaaactctgaatgtctagaaattgagactgacttagtccatcagagcctgtctgctgcactgttgcacacatattaaaaatcagatttagatcactggcttttgtagtttttaattctagccacatttcacacatttgattgatacattttacatgtgtgtatactatatataaatacacatacatgtacattacacttgtatatgtttagatgttatgcattaaaacatttcacaagcagtaaattccctattgggtgtaattccttgtgacattttttcacctattctatgataattaatttttttgtaaatatggctgcacctacctaaattgattttttcacataatagttggaaaagttatttcacaggaaaagtgtaacagggctattattgactgccatgaatcattaaatgtacctgctacagtaagtcagcatctatagtattattcatttattttttaaaagctctaaaatagtttaataaaaaagttgaaaggtatattagttggtaaataattatgctttaagttatgttgtatcttcctttcggtcatctgtattttcatttaatggttgtctaatttataattttaagtaaggaaataggattatttggcttatgataattcttaacccatatagaaatctagttgtcagtccttaagtgtataattgttcatagctatatcctcttagttaagaatgttgatattcaaaagacagagtcctcttccttctttacttcaatctcagaattgctatacatctaaaattataagaagttgtgcctattcacagtttcactagaattacctaacatgctttaataaacccgtttgcaactcagaggaattggcttttgttaaatcagggaagaacttttgggaaaggcaatctagattcaatttcttcttaaccatcttccaagtcaaaaagaccggatttatgttagtgaattggttaactaagggttaggacaggatgacatcagtgtccctccatcactcaatctctgttccctcactctcaccctatcaagcctctcttactttgaattaaaagtgacttaatcccaagacactgaaatctttcttacctccatctgtaaaaatttattcttgaaatgctatttcaagtgagggagttctgctcatagaaggaactgtgaattgaattggagacttctttaagccagatgttttttaacagctgtcaataacttcaccagggtgtgtgacatacaatataatacccagatgtttgttaagtacatgaaagaagaactgagggaggggagtggcaaaatccaggggggcagagatgtggatagaacacttaccattgaaggctgaacaaaggacacacctgtgtgcagagagggccctgattgagggagcagaaggtggcaagccagctgaaggaccatgtgtggcgtaacagtaggcagactagaatgacagggaagccagataatgaatgattttgaaatctaggcagagtgagacaacagcattttcaacatgagagttaaaaacagtgtgtctttagtttatttcttttatgagcatgctcacatggccagctgtgttgatttcatgcctagaaactaggcatttgtcagaccacataagtcagtgggcaggtaatccctgggacattattctagaatgtgcttataagtctacaggaacatgtagcagcaggtattttcaggatactagcaaataggaactgtaatggaataacaagagttaatgaggctgagtcaaacagaatggcgaaagtggaaaaagtcttgtgcttttcatactaaggcggtcagtggcggttagtggctaaggtcagtggccattccctgtaactctgctcatatcgctgtttggtcaacttgcttggctctgtacttttgagatgatcataaaacttatggagttcactgctgagaaaaatgtagcttcttgtgcatgcttatgggtcaaactatgcagaaaaagaaagtggaaaactatggtcgcattgtcccaagttccatgctgtggctaagagcctggccttcctgtccattctcacaaactctacactccttgtcttatatctctgctttaagaccaaaaatgaggttcgtaagtcagttaaaattcacaacagtgagttagtgggtctacaatctcaatgacttgaaagctgaggcagggagatcatgaatttgaggccttcctatgctacaaaatgaggtgaaggccatcatgggcaacttggtgagactttatctaaaaataaaaaataagtaagagggttgaggattcatctctgtggcacagagtgcaaaggcatatgtgtagcccagggttagtacctgtaccataaaataatttttaagttgctgtttgggggatagttggttcttttcttcctaattacagcaaaagctttggaatcatggaggaagggaaatttgtggtctgctgaaggtgaagttgtatagtgagacacaaggaactctgtttagatgactcttgtattgcaggttaagctgatgctccatcttcacccctgtgccaggcaagatttgttcagaaaccgatcacatgcttgtttttctagcatactgtccatcagccacatattaaaaaggcttacagtacttgagtttgggggttggtctaagtgtgtgtgtttatctttcctgtagatttgcttctgcttcagtctctgttcctgagactggcaggaggggttgacatcacttgatgttcatgtagttccaacattaagacagtttctcttcatatggacttactaaattattgtaagcaagccatattgtaggtaagtcctattggtgaggtttcctttagccatttgaattgctaaagagtttagaatttagctatgaaaatctctctagttcttcaatgtagttatccaaagataatggtcgagactgattctacacatcttctaggacactgcctggaaatggctgttgcaaatggctcacatgcaatttaaaagattaatgtgtacatccctaggaggagggatcagtgttcttatccatttaatatttttcaatagggtgagcaccaaagttgggtctatgtcttttccacaaggaagttagtcaagctgtacacagggtctatatctttaaatctatgtgagccaccagacacaggtgttgcttgctgtcaccccaggctcttaagatcttttcaccatagttgcacccagtgttcctttttaatcatcgtgatacacaaaaccaatactctcattgcatagttgataaatcagtactttacctgggcataggcacataacttctcacttctgatcactgtttctttgttatctcaaacccccaggttgacagtgacactatttcaatgtgggcttctatggaagagtgttttttaagttatttcatagggcagtgctaatcaggttgcactttgaacagatcttttagtgaagtctataaaacaccagatgttaatagtcttcatgatttgtaggaacttaaacaaaaaatacagaaagagaaacatgctccttttaaaattaaatttatgaataaaaaagtgacaagggtctctatctaaataaaatgtaaccatgtctgagttttcaaatgacccaatactattttattcttcttttccagaattttgactcaaatcatattagtctatagttttaagagaaatagttctatattagcttagcctcctttgccccacaaatgacaaatcccctttcaagataaattatttcatatcataatgaataaatactcacacctgtgtgcatttacattaatatcacacactacagtagtaaaatcagcaaagagtatcatctttaagcatagaaaagtgctttttaattctaagagttaaatactttattggctatgttttggatggaggagtataatcttagtttttagttccttagtgatttttctgccttttacaacatcagaatagtaactttggatctggccttcataagagatcagatttctttacttaaatgatagcattaacaacatttacaatattgtcacagccaaattaaagtgactcggaggatgtcccaagaacaattttaaaacatgtgcctgcatcagtggtccaagcaagattttaaagcagatgctattattgtctccatttatggatgagaaaacaggtacaggattggaagtggaagtctttgtccattcagactgctatcacaaaatacactaatgcaacacagacatttctcacagtaccagaggctgaaaattcaggtctgagatgtcagtgaattctatgacttgtggggattcagttcctggttcacaaatggcaggctcttcgtgtgccctcacatggaggcccagaatttcacttggatgtgttcagtaaactatcatgggcaggaagtgtaggcctattacaaactgctttttattttctttggagggaaggagctaagcatagcttggtaggagttactttccttaaatgtgggaagcttttactgccagctgctgaaagctaaactgggagcccttttctaaccaagagaaaatatcttgcttctcatgtctgctatgttgtcagccaaagtccatacaaggaataatgaaagtttattgattatgaattaatgggttaccaatctttactacagattgtagaattattaatcatttcttaaacatatcattctttgcctaaaatgtggcagctttggactgaatttttgtactacccagccaagaaaaatactgcacattaaattctataatcgcaaggatatagactagcaggtcagacttgggggatgattagatcttaagggaggaggtttgacaaatggagttaagtacttcatgaaagaggcccccaggagcatcttcacctcttctcccatgcaaggaccaggaaatgtactattctggaccagaagaaagccctctcaaaacgaaaaacaaaaacctacattcagactctcagccacatggcaaacgcatttctcctgtttataagcactcagtctatgtgttctcacttcagcaacagcttaagacaatagctgtaagtggggatttctcatatagcccttaattcaactcaactacagtaggcagcaagtcaaggatacagctgtgacaccttatttcccaaatactataatttctccaaaatgattcctacttcatccttccagagtaaaaaatacagttaaataagtaggccaatcacttttatattagaacatagaaaatgagtgataaaacaactcaccagtcaataacttgtattctccttttaaaatgtcaactctcttatagctatagaatactcccaattgtttaaaaaaaaaaaacttggtggtcaagatttcaaaaaactaaaggaaaagaaaaaattccatgtactctctgtaatagtagcatattagcaaaatattcctgcttgggaaaaaacccaaatgggggatggcaaaaagatgttgacagtttgaaagaggaatgagtagactttgatctcaagactcacgattggcttctttttctccatcaactgtacatgagaaggactagattcaagtttgagtttctaccaattacatcctcggaaagtgcatgttatgtagttcaatcccacaccaacacatcctgatatttgtaactgtagtgcctacttgacagaatgcattcacattgttgtcctgcagaacctctgactcagattcttgttaggaggtatatcccggggtgggaacctaggtgttgcctcatagctcagcctccgtggaacgtttatggacatgtttatgatttgctaatgtgtgctgtgaccccatcagtctgtttgcagtggggggtgggtgggaggagagggaatgtttggggagggagagtcatttgtttgatgtgttcatggtgggaaggggagggaggggagagggttcatcacggtgttcaaattcaggttaacttaaggggttcagtttgggggcctaggagggtgtagctcagtgctagagcacatgcctattagaatgtgtgaggtctagggtttgattcccaggaccacacaccaaaagataagggtccagttttgacccttgcacacaaaattctgctattgtgactcaattctactatggtgcagcttttcggtggtcgtgagttattttctttctttcttcatttgatattttctttcctcaggggaaatctctcacatccaagaggttaacaagccttgttcagtcttactaaaggatcacctttgtgacatggaagctgaatgcagccatcgccccataccttgtagcccattgctgttacctggagccgaggatgttagaccaagattgttgcatgaatgaaggacctgaattgttcttttctgtgtgcacattaaggcatcatcattgccaagggaccctttgccatctcattgcctccatctccacctgttgtctgcttcccttcctcctcttactaagctgggtctgtgtcttttcctttttaaccagttcaagtgaagtaaaactttattttcccccttcctctctttttcttaaagcttctgctagatatacacagttcactgaaaattcagtcagtcacaaactggaagaattgtaaaagaaaaaagtatatatcaataagtatacacatggcttcacatttattaaataataaattagcacgggaggtgtcatttcatccttgtatccacagtctgaaacaaatgcccatctttgtctgttctctggacattgtctgttcatgttttctgcgtttatttttataccatatttaaatgagaaaacaccttttactccaaatgtatcaaagttgacctctgtaaatttgtgtatgtttatattgttgttttatctttcattaaaagatgcagaatctcgttgctttgggaacttttgttgttggtgagacctgtaaaagacagtggagagacagcactcagagcctgggagctgaggcttaatctgccctcccccaccttatctctggtttggatgggatggagtcaggaccagcacactgcaagcatctccctggtgggctgacctgggatcagggtgatggtttatcttctatggagaaacaccataaatcagacttccacattttcagacccttctgaggaggactttctgccatgtgctgaagtctatgcttggctaaaagtcaatgaatattttagttagaaccaggcttggaaagtgatccttttttctttaaatcatactcctgagtttacccaaggtcaatgtttctcacctttccagtgattagagattccttttaagtatcaggtggaattatcagcatctagtgaaagctgactgtcactgtcttatgggctcgattagtggcttttctcattgctgtgataaaattctaacaaaagcacttttgagaggtgggcttagagcttatcctggaagagaaggcatggaagcaggagcaggagatggatgggactggtcatttttatgttccttatcaggaagcaaatggtgggtaggaaatgggatagggttatcaaataaatgtcaaaccccaaccctcaatgccttgtcatttcctctttcaagaatccacatcctaatggttccacaacacttcaaaacagcactccatagctgggcagcaagtgctcaaagacaagattctatgggaaatatctcatgttcaacgcgttgaagaaaagaaaaccagcaatttgccagaagtcacacaaggttaactggggttagagtagaggaacccccttttgcctggcttggttcttggctggatctcacatctcagacagattaacaagaaggaaacacgaatttccttaacataagctttatgtggcgggcaagttcatagcaaaatgtggacttgaacaaaatctacacctggctgtttcctcatttggtgtgagggctgtgaaaaagttccttaagaccaagggaatgagacaaaggaatcaatggaggagattcagcaggtcctgggtgatcttattcctcttagcacactcccacctccagagctattagtgtcggcctcctttgcgtagggaggccacaactcacatgaagatcttacgatccagttcttggaaacttcagagagtacttcctaaatctgccccttcttaaatccctctgtcttaaaataccaaatgcatcaaggcaaagctcactcagtagacaagcctaatgacttgtgttcaatcccacaatgcacatggtggaaggagaaaacagactcccctcccacgagttgttgtctgacctccatatacatgccctaccccacagacctagaaaaaaaataaatgtgaaccattaaaaaatatttgacatggcctggagagatgccgcagtttttatgagcacttgttgcttttccagaggacctggattcaatacccagtacccacatgctggttcacaagcatctataactccagttcccttggaactgatgccctcttttgacctcagagggccccaagcacacacatggtgcatagacattactgcaggcaaagcactcacacatcaaatacaatttataactctaatttaaaagatactcaacatgcaggatatggtaataaaatgaaatttataattctaatttaaagatattcaacatgcaggatatgatgttttggcacggtgtttcatattgccatgagcatataaatccatgcagtctggccttaagacccattgtactacacctgtccctcactcttccatctttttaaaaaaatagaaaattcactgggtggtgttagtggcaaatgcctttaatcctagcactcaaaaggccgaagcaggaggatctctgtgagtttcaaggccagcctggttacagagcgagttctgtaacaactaagacaaaacagacaaaccctgccacaaaaaaatctatatttcaaattaagctattattgagaacaagtctttaatatcccacatggaaactaaaatggaactctagttaataagctgttattggaagacgatggtatgtaaaatgtgtgctttcatagatgtgaggggttatttcggggacaatctttcacagtgttatgcaccattgttatttgtggctctaaatcatggattcatgcagaaaagaaaggctaagaatgccccctcaagaaaatcagagagtggggggcggaggggatgcttcaggaactaacaaaatgattttaccacaccagtagcctgattctgatcccaggagcccaatacgaaagtagaagaaaagacccctgactgtacatgttgtcctatgttctccaaacatgctctgtgacacttgggtgtctgtgtggtacacatacgtaagaaagagcagggggggagggagagagggagagagagtggaagaatgcaccttaaaagttttaaagcatttgaagacacccaggtttttctgggcataggtaaaggctttgactagctttcaggaagcacaaactaaagcttggagttttttgtcttttagtcctgggcaatcttagcccacctccaagaccatcctcatctcttagaccagctgaattgtaaggcagacaataaaattccttaaagctttcatgaaataaagtggctattgagaacttctaccttcacactatcctcacagatcctcccagctcacaggtgtccccaatccccagtgactcagagtttctatattcacattacaaaagcatctattcctccttgatccaattcttcctttgcaatgctgcactaatgttttcagaaggtctggggaaaaatgttcttattctgaataacagaaacgaggctgtaaacttatctaagttacactggtctgacagggcccagtataagaaatgaaggcaggatgcttcccatctttctcacaaacgccacccttaatcttgctgtttggaacttgctgatgtattggcccttagagttgggtgcacatttcttattatgtaataagttagaaataatttgggcatttacttaagagcaagacttgagtactatgaattcatttcattcatttcagtgcaagtatcgattgtgtccatacacaagtacatatttgagacagcatattgaatttcctatagctctgatgctgttacccatgacaactgctttgcatgttctgagaattctccaggatacttacaggaagcaaataaaagtaccagtctgtctccaaagacttttaagaaacagcatgtatcagtgaagaatgcaaatgacagagagagaactaaagtcatatttcaaccacgaggatcttataggttttgctgtatgactgtatagttgtgacttttcattaaaaattttagccccatcaactcagtttgagaaaaatgcaaaaaaatgctcctacataaaattttattaaaataagactaaaacacaacatgcacatgaccttggatatttagggatgtttccttggggctgaaatgtaatgtatttgtaacttcatttccaaatggccattagtggctaaaaagatgtgaacatttcttgattaataaattgattcataaatcttaatgtctttattaggttataaaaccttaatcatctcactcttgtttggaagtccagtaggtcagaccatgtttaatatcttttaaaggttaataacatcctagtcctgtattggctaaaagaattaagataatatatgcaaatcaccaagcacagtgcttggtgcataactgataggcaataatttttctcttacacacttctctttttttctttaaggagacatctttattaaaaagatacagtaagtatccatacattcttttttaatcaaactgaagtagtgaatggccaaaagtaaatagattcaggacagcagagaccttgggaaaggcctgacatgtagagagctgtgatggaggctaagaaattcagtgacaataaagctgtagaatcaaaagagtgaccagagaactgggtcccagaggaggagaaagagattctggaagccagtgcttgggaaataggaaccttcccaaatacacccagggcctcgcccatgtgtaggctaaaaccccacaggagttttctcagtattcactatgacagtaggcagtggtgagtgtaagatgtgggtaccatcatctaactaaataactaccatgttagttacactgcaaaggacacaggatttgtattgcaggtagattcttggtcttgcaggtgtcagaggaagggatatgggcagatacaaaagagaaaaaggaaattgctggaaatggtgctaataagggttgcctgggtttcccctgggttttgtcttcagaagacggagggaaacttgactctggcacttttaaactaattgagactcaactacagcagatacatttttggagtgagattaccatcaaaataacactgaacacaagaaaaaggagctgagacatctcatgcaaatttttaaaaaaaaattgcacagtatttaatagcaaagttactaaaattggaagaatttcataatgaaactaataaagttagctgaaggacataaaagaacacttagctaatggtgaaatggaaatttctgtaatggacaatatgtttatttgctaatgagtgtatcaattaaatatatcaaaacctcagtgagattatctgtggaactttgcaatgtctctctctgagtgataggatttataacacaactattcaaggatatatgggacaattcaacaaaatgaacaatgtaaggccactcagtcttctaagctacgcatatacctaaaaaaaaaaacaacaaacacacacacacacacacacacacacacacacacacacacacacacacgcaactttaaaaatagtagaattaaaatactgacatgccattctttcacacctgttgggtctacattttgacatctaaaaggatacagtctccgtagatgagcaagctaagttttaaagataacagtggaggaaggcctgacttttctctacgaagattttgtgctgttctttgcctattgtgctcctggcttccgactctgaaagagagtgaggaagtaattgtagaactgactggcctctgactagcttcacttcattagacttcctatcagcctctgggatgctacctcaattgacaataatctggcacccttttctgtctcttgtggggaggtgtttcttacgtccctgaattctgagctgctcggttactagctgtagaaacagtactttataaatattttggaaagcccctgatctccctttactgacttatggtccaaggactacagtaactcaggtagcccaatgtctgcctggtgtttatgacataagcagccactaactaaaagtgctgtccagcaaataaaggaggtgaaagtgctgacacaatgacctgctttaactgtggattgatgataaataggcaaccgaaaagaaaagaaaaaaaaaaaaaacaaacaaaaaacaaaactgatcagaaaccagaaagcatgatgcttgttgggaaagcgtggaactgacaggcaagtatggaccttatatctgtgttttttagtcaggtcttcctaaaacaaaaccaacagtgaacacagtgagtcccgggattttcttcagtactgggaatccacgatctaccacacactacgtatgcagtcaaatctggactcacatctcctgccccatgtctgtttcattctgttctttatttagacctccccttctccttgtactcaccacctatttgaggtacaatgtcttttgacttgtatttgtcaggacctataaataccacttcctctgagcagaccagacaaaacttcattcctttgctgtatttgcaaaggtccaaggctccagtctctgaactgctgtgtcctcttccccagagacctgctgaccagcagaaagcctgtggtgtactttgtcctgcgttttccacagtagctttttcctagctcaaggtcactggcatctctcattacaggaattctttgaggcttgaagtgaagcaagtacagctggacagtcctgacttttaggatgggttcccacgttttctatgaccatcctcccaggctctcataatgtgaaaactcagtaaacgatatgcgtctgcagggtatgattacctggccaaggtaattaaaagcaccctttcctaaatacttccaaggtttatttttggttttgttttaataggccagagacacagttccatgccaccatcagcagcagccaagggggttttggtgtccttcttcctagaatacctgtagaaatcttttccaaatggaatttcattgacccacattttgaatcagttgaatctaccagaaaagttatcaatattgagtttagcagggttatcacgtgaaagatttatgtctaaatgctgatggggctaagtgttatagtaaaggctttgccacagtcgctggcatccatttacccaaagagtctgggatgttatggtggaggttctacccaagcctcctcacccatctcccttcaaaccttgctgcatctcagaaagcccaccaaatgatggtccctcccccacaggtaatcaagaccactcccacaggttatttaaactgccccccagaaaacagactggtgtggttatttttttctggtctccctttcccatctcctctcttggggtctggaaggccacgcaggagcgatgtatcgattaaacatgggtttttctttttctaattcagtttggtttggtctgatttggattgctactttggcagagaggcttatcggagtgtagaaacttttaaccaaggacttccagaataatgaaaaccttaggaacaatgaaaatagcagcccccagaattctggaagctaacgaaacactcagcagctggaagatcattgatttaaaagagtcaacccaatgtttgactcagcttttcccatctccttacccctagttccatggtaacattgagaaccaactatctcataattatgattcaaaccagcagtcactagatggaagggaagggggtggaactttccaccaccctggtcccaagatgatgactcctcttgggtttgtctggaagctcgctgagctgaaggtcacattcagggtatctctttgcttgatccaagtcagagtctgttctgtgtgaaaagttcagacactggtgtgtgttccaaagagaaggtaaactgctcaatggctatggaggcaatggtaccaagtgaggcttaaaggagtgtgacagtaccaagcaagggatgagactaatagtaaaatctgagtaataataagacatatccctaggaattgagacaaacacacacaggtgcagggcctgccacatatggaggaaaactcagagaagctctagctactaattctgtctgactttaagcctctgtgatagcaggacctaaaaaaaaccccaagaactagaaactgcttgctggaacatggaaacctcatgcacatacaaatgcacgcatattcatgcacatgtacatgcatagattttacacagcgcacacatacacatgcttacacatgttcaaatatacatgctccacacacgcaaatataaatgcacacacacacatacatatacacatggacacttgtatgcacactcacacatgcacaaacacatatacacacagagccatgggaacttactggtacaagacactgtgatttggataagtgcccactgaagggctgtctgtgaaaagctttggttcctgctcctgaggaccagcagaacatttatgaggtggagcctgatggaaggaactgaggtcactggagtgtgctatttgagggaacattgggacaactgctccatcctttcactttttgcgtcccaggtgctgggagatgagtggcttcctctaccatgtgctcctcctgggatgcactgtcttgtcccgtcccaaggggaatggggccaaccaacaatgaactgagttgtctcaggtgtttgtctactgatggaaggctgactaagccaacattaaggaaacctctgaaccatttttcactggccactagttcaacagaacagacttggtggctgcaatgaaaaatagtgcaatgtttgcaaattaaacatgaatgtcataacagagatgggagaaaagacgagaagcagcagcgacagcaaaccccaggagagcactgtggcagcggtgtttctacagtcaatgcattatttccaaatgtttcattttaatcattagtattaatagtctagggctggggagatggttcaatggtcaaagtattagttgcagagccatgaggacctgagttcagatccacatgcctgtaaccccagcactgggaggcaaagacaggaagatgcttgcatctggctgaccagacagcctaactgattacaggacatcctggtctatagagtgagttatgagacagccagggctacacagaggaaaccctgtctccaaaaaccaaaaccaaaagaagatgggtaagcaattgaggaaaacacctgacattggccttcggccttccctgcacatgttcctgcacacacaagagtacacatgacacacacatgcacacacacaaatgcaccccacatatattaggaataataataataatagttttggtatatacaaataactagggtagtatgactcatacataggtaacataagaaatcatgagagactgttcctaaagacaccaagatgttggaagtgattaaacaaaattagaaagatggactgaattaattagtcaactattataaattttcagccaaaaactaaaggaaatcatacctaaagaatttaaggaagaatgaaagtaatattggaacaaacagaataaaatacccccaataagtaaatagagagacagaaatcagactagtgtctgccaggagtggagagagatgaagtaaggagataattttctgagtaataaaaatgttttaaaattcaggaatggtagtcattgcacaactctgtgtatacatgtgaagcactggcctgtacgttgtaaaagggagaaggctctggtgtgtaaatggtatatatagaagtgtcctgaagatgaatcacctacatagcagaaacaaccataaattgatattcaaaagcagtattatttacaacaccctaaaaatgaaacatagatgaagttaaagtattcgagagctcattagcatgaatgaaaagtagcatgaagaagtaatttaacagaatggtaccttctgctcattacttagaagaaaaacactaagtaatatgatgtgggacagtcagaaatccatgtgttaaacctaagataaaaagttgaaatttgatctgtatacaaaaataaccctgcatggggcaaaacctaaaattaagccaacactgtaaatcttgcagaatcaaacagagaaggaaatctttgcaacctggaattacccaaagatttcttagatatcttaccagaagtatgaactgtaaagggacagattaataagttggtttacataaatttattatgtataattttataaatgtttaccggtcatggattaattttaaacaccttcaagatttaaaatatctcttcttcaaaatcagcattaagagagttaattttaaagaaccagtctctgcatcccaggaaacacttgctttgtaggaattccatcaaactgccctcagaaatggacatcagcaggaaccaagactgggacccaaatgtacccaactacacagtccatctcctctccacactgccacaggctgtaaagagtaagaggcagtggtcatatagtgcacaccaatgtcacatacctgcttattgctgtgtcaccttgtacaggagaacaagtcctgtaggacacagataaaaggtagaagctgcgctggaatcctgagccctgtgactaaaaactccaactgtgaagtcagacttgggtaattaagtttcagtggcttccaatgccctattggttaaatgaggataacaggcacataaaactattgagaactttaaaggttatgctttatttcctcattgttaattgacactgatctgggcatctttatggggtgtattatggcagctaatgtatacaatctctaatcaaatcagggcagtgagtctttccccattttcaaccattaatctctcttgtgtgtatgtggtgggaattccttatacttttaatcattttaaaacacaccttaaattgttttgaccaacagttcacctgcagtgctaaagagcccagggtcatttctccactccatttaggtggtccatattgactgcctcccctcctcagagtcccattctgaacaccctgctccccattcttctaaaaaattgtcttattagattctgaatatgagtatgtgaatgagaattcatgtttcttgtctttctttctcacttaacgcagttccatccctgttgctgcaaacacaggacttcaatattggcaggatggctggcaggattgctgtgtgttttgagaaactttgactcatgtatctaagtgatctttgattttcatcagttgctaacaaatcaaatcttgcagaaaacaaaaaagttggaaaagaattgaaagaagggagaagcattgagggaacaaggagacaggaaatgttgcagaatcgttatctttgacatgtggcaatgctaactctgccagcttccccaagggaggctctcatcatgatgacaaagaatagctacagtgtccacagcagagtgcccaaggacattctcgattgggagccactgccgctgggaggtgacccacaaagctgtccccagggccagtgttctccaaaaacaccatctattatattctttcttaaaaatcaaaacattttattccttttttaaatgcccctttactacaagctcagccctgatgcgatcacagaaacttcacttctccctttatccacacgtctttcacgggcagttctacccccactattgcaaatagaatgaggaattctctcttaaataaaataaacaaatcggtgagggggttctggtatttgaagggatttatttataactactttctgactgatgcagatacctttatgtcttaattggatttatccttaatcaacatgaaaacaaaaatgctatacctatgactgaaggcatcatgtgaacatctggtaaatgtgtacattatgtaatcaggttatacactgttctacttctttaggacaaaaaccatccctttcttttaagcttcttaaggtaggctggtcacagctgccatgcacagtgccttcattatgctacagcgcacaggcactgcctatttctacccaaccacttctgttgtgctgtaattttccagctcttagtaaagaagatggggctagagaggtgattcatgagacacttgctgccaagacttatgacctggctccattcccaaggacccccatgatggaaggtgaggagaagaagctccaagaaattgtcctttgacttccatatgtgtgtcatagcatttatacttaccaacctgcccccgacacacacacacacactgaaaagaaaaaacctgaagaaagagaatgaaatgcttttatatggaataagcactgtaattatcttttaaaggatagcatattaaaaaaaaactcactcatatataaaacatccttacacggatataacagtatttcaagtgcttctatacagttagtaagttttattacatgtgattctaactgttccagaaaacctggatggttttcttgatgatctctatgctacaggttgcactgcttgaattgtatgagctgtgcacatacttttgcacttgtcttctaagtacttaacagaccctgtgatgggggaagtccttccatgtatgtttatcttactggttgtcgaataaagcattgttggccaataaggaagcaagataggtgggactaggagtcgaggaggattctgggaaatgtagtaaagagaagtctcgtgatccaggcaggaagtgacatagcaggcagacccaaatataagcagggacaagcaggaaattgctctcttcttcctcctctcttctctgtggagccgccatgtgatcccagcaagaaaagatgcctgccagtggggtccgataagtctttataaaatatatagattaatagcattaagagataccatataagaaagcctagtcattggccagcagcattgtaattaatataagactctgtgttattttgggggccctaaagccatggaaaaatgtctcattacaattgtgcttaattttgaccattacaatagactaaccagagagttgggaccttaataacaggtatttctggcattcggtgaattggttcaaggttaattagaaagttataaaagacactgaactggccatctatatggaagccctaacctgtaaagttttgtttgagcaactttataaaatatctttctattagaaagtgaaaaagatcaggggctgcagctgtggttcattagtagagtgctcacctagctaatgtaaggctttaaattccactacacacactgcaaagtgaagcaaacaaaattaaagaaataacaaaagttaagatacctatgtcaccaacgaaacagcccatcttagagtaccagtgtggccttgggaagaggagtccataaaatagttccaaactccagggattcctggcaggtgggaggagctcccatggggactgccattttagatgtctcaggctgtcacctcaggggagccagcctttccctatgtgttgtaaaaagacagggtgctgaacgcttgccttttgtggataattaaattgattagctatccaaagggcaaataagagtgatgagtcaatttgcattccttcatgtgacagctgattcagggctcatggaatttattctctcattaaaaactaaaaaatgggaatgtggaaggagttagggtttctgtgactgtgcttttggtcctaatgtagtctccattagagttacagattctcaaaattgctttatgttgcctagctgtagcatctgaccagttaaataattcaggcatgcattttgttctcctgaagacatgggaggaattataatagattctatcacccttcttcaaaaagaacacaggaattcccccaaagagtttcctagggttgctttctagtgttttaaggacatgcatatgcagatatgatatatgcatattaaaatatacctatagagagaaagatgatgactaacacgtataattttctcatccgtcagatttatttattagcatacacacttttagacctcatgaatttacataatttacataatttatctataaggattttcttgctcatgtgtgccttagtgatccactgtgcatcccccacttttctccattcttttcactcctttttcttaagtccttccctttaagtctttcctagttcctgttacgactgagttctatacatttgtggatgacatttgcatgcctggagcactaggaactgaagcttgaagccaaggcgatttcagaagcatcccctgagactttgatcttcaagtagccccttcatgattccaaagccgtgaatccacagactaattcagagactttgtattccaaaatgctcaatggctaagacctaagtttcctgacttcttaaacgtaagagatgtttgtttcctcagagcctcttttgtcaccgttctagcccactttcatgcttgctctttcttgtcactgtctgactccccagggattgtagctatccttaattcgtcatgtaacatggatccataaaaatgggtatcaacaatccctgtttccttggtacaaagagagcaaaacttctctttgatgcttcatttttgaaaacagacaaaatataagagtgtgagtcacaaattcaaaggccttagaaaaaaattggtcccctggtaggcacagtctaaacccaggttagtgaaatgttgtcaaactcactgaaataggagagcaaaaagaatgtgttttcccagtcctacggtgcaagcatagtgctttctaagcatttgacaagcctgacatctagtggctaactggtatttctaaggtagctgaaagaccaagataaacctatctggactgaagtgttctgtggaaacctggtggatctatagctgtcaaggtaactgtgaagaatggaaagtatgaaaatcatttcagtgggtgtggtacccatctgtgatcagctgacttgtctgtgcccaggaacacaagtcccatcacagttacttcacaaggaaaaggggtcagagatcaaagagcaaagagatgacacaaatagcccacccactgaagtgtgtgtgtgtttataaatacataaatactaatgaaggcattgggatacagtgaactattttggcctaactgaaaagcaaaaacttgcaaaatagtcatttttttcttacttttatttatgagaatttggcaatacctatgtggtttcagaataaacaatactgtctcctcttagagacgagtgtggatttttttgttgttgctgtcttgtttgtctacactagaaatctacagagaattctcccagattcctcatctgagaaaaaaaacaaaacctctgctgtaaatgagttaaaggatggcttctaggggaaatctaaacatacatctatccagtgctctgaagggcatccgtatgtgtgacaacagggggcagtggctgttaggtgaaccatgggacagtggacatcagacactgattaagctgtgttgttattaatgtgccagcaaatattggccactacccttggatgaaataccaaggaaaaagagttcatgggttttctatcttgtatattgcctaatgttgccccagccaagatatagatactgggtgcggggggggggggggaatcttactttcagatgtgagtgtctgcatagcatctgtgcaaatggaagttatgagtgtgggaagctaggttggtagcaggcctgaatttactgcctacagagaagggcatcctggtctagtgtcctcacacactgaaagatgattgctgagccagcaagcagaccatcaataaatatagttggttagagcataaaattctgaataaaatatcaaccttgatgttagtgaatttcctctattaaagaaaatggtccaaactcaagtatcttcatcttaagtttattttaaaaacctgttccacttgcccttgagaaggtggaggtttacatgttgtcctcatgaagagccagcacattttaggcatggggcaaagatggctgctgttataattggtcataggaatgacagttgacttgtttttacagaaaagaaaagaggcccagtgtgttccgctgtactgctctttgtgggctgagcagacttgctgggggagaaataacaaaagacatagcaggtgcctcatcccagccatattgccagggacactggagaacagtgacagtgagggggacaggacatgggacatcagaaacaaagctgaagtggctccagtcttttattgtctttgctctgttagggctggcattctttttaaccatgcatgctaaaaatagggtttaaatgatatcaatgtgcaatatgtggtattcacatgcaaagacttcgttcaggttgagagaacatcatctttctgtaattacatttcccttgaaactagtggtttcaatgaagtgggagaaaaacttagagaaaattggattttcttttcaacgtatgcaaagcagcttggtaaaatccaaatatccccatataagttcttcttttccctcagaaatggatttgacagttaatccaattggtgctaattgtgttccttttataaagctaagtttgtgctccttttataaagctaagtttgtgcttctcagcttcgttgtgtgtgtgtgtgtgtgtgtgtgtgtgtgtgtgtgtgtgtgtgtgtgtatgtgcacacacgtgtttgtaggtttgtgcacatgaatgcaagtgactgcggagactacatggattggttctcctggagttgaagttatagcatgttgtgggtggccaattagggtcctaaaaaccaaactcatatcctcttcaagagaagtacctggtattaatctctgaaccacctctaaagcctcataaatagtatttgaccctagataaaattaaactaataagatgagtagtggtggtccatgactttaatcccaggactcaggaggcagaagcaggcaaatctctgtgagttccaggctggtctacaagagctagttccaggatggcttccagagccacagagaaaccctgcctgtctcaaaaaacccaaaaatttaactaataaaatttcacttgggaaagcatcttaggaaaacttacaagcattcaaaaagttaaaacctcactagatggcagtaagctggtagacacaggaagagacagcaattgcctctaaggcagaaaagacagcccatatttaacaacttcctgaggggaaaataccaattgtgacgaaatgagggctaacaagaccatgtcatattaacactaggacagatagacacgtgattccctttgtaacagatgctccttccagccaggtcatgtctttgcaatcacctgtgttttccagcatagatttgtaaactatcacaattgctattattgactctctggtgggttgtgttgggtttaaaaacacacagaaagacagcagaatgctcttctacctccttagctacaatccaaagttttcatctgctagtcaggaggaaggaactagaggggtagctcaggctataaagtgctcctgctagtgagagaagacatgtggagccatagagttccctggttgatccgcctggctgcttgacgagaatcagactggtgagaaactctgtctctgaaagaatcttggatggcatctgaggaatgataactgaagctaaggtatggtttcagtgttcttgcacgtgcaggcactcacacaagaatgcacacacacacacacacacacacacacacacacacacacacacacacacacacaatcagaattccctaggtccacagatatccttgaaattgttaaattatactactactttggaacatattattagttcacaaacatatttggctgcctttcttagaaatacaccatagtaatgactactaatttcaaaagttcctctgagatgcttcccatgatttgggtctagagttataccactttccacgctcatgtagtggcaagagaaaagcaaaactttagcacagccttcctgaattctgtatgatcatgtccatcccttgacttcccttgctcttggcgtccatggattgcttaagttaactttgtcctaaaactacagctgcatcactggcttcctctgaactgatataattcacttttaaaaaattaaatgtaagttggggatgtcacttgttgatagcgttcttgcataacataggcaaggctctgggttttatccctaataacacaaaaatgatgatgatgatgatgatgatgatggcggtgatgatgatgatgatgatgatgatggcggtgatgatgaagcacttgtgtattgtatgttgaactgaaggaacagaaaaccaaacatccaagcaccaggtctttaaaggaaactttttgttcacaccagtgtagtgactatggaagagggtagcatgggaaatttagaaatggttaattccaaatagattcagaagcagcacatgcttcataattgcacagagactttaaaagctgtttgcatttaattgtgtggataggtgtaattatgtagccatgacttactaaaacagactttcagatgtatgttcaggggggaaaaacaacataactccagtgtaaagaaccaaatggtgtgtgctcaagtgatcttcctgtgcgtctgtgtcactagctcccaagtcttgttgagggccaaataactctaacaaacaatatttttgatgagttaagtgtaaatgaatcacaaacatatggattaaatttcccttaatacacttggatttaaaaattaagagaaaaatgcttggtaaagccaactttgccttttgccaaacccgagctttggaaaatttgctggagatgttcaataatccaactgaggaaaacatggcccacttcctctctcccctttatagaatctgtgtttgttcacacacatggtcccagagaagtccacagagacattttgattggagatgacgccagctactaaacaagacctttctcagaaaaaacccttgtttattcatgattttttcagacatttggctgcataattaattaggaagtcttctgtagaattatctttcttcgttagtatcccaaagaaaagggatgtccacttctactgtgggctaatgtttatctgtctacatcctagatatattcccagggatgttcaatggaaagtatcctctcttaattttctccagatgatgttcttagtagggatggctttcctgactgtctcctaaatcctgctgtgtaactctgcacatggtcatagttaacataagtgtgtgacgaatcccagatgtggaagcaatcaaagtgatctacagatctaaggcaatactcagggggacaaatgagggatatcaggaggtcagggcaattaatgagggtctctctgaaaggttttggagttgtggagtaggggagagagtaaatggtgagtaaagactggggaaaaaaacacaggaatctatcatgtttcagagagaacagatgaagtaaatgcaaagactgtgaaaaaatggttatagctgatctatcatcgtgtgagtaaatactttttcattctgtgtgtgttctgaaggcaaaagatgctgagctatcaacccccatccattaagttttactgaatgatactgttggattgaacggccactgaacactgtcaagagaaaacgtaacatgaagatccaagacataaaagttagcacaaacaaaacacggcttatagcttatgtattggagacaaccaacaggataatcagaatggcctgggatggccgaatttcgatttgaggtgtgaatatcttggatttgaaagccggcaataccctttgctgcagacacaagaagtaacctcctcctctgctcacacttcgtctccccgctcttctcctgtgtgttgtgaatatggaaatacatcatatttcagaggcttgtattatagatgagttttatttaaaatattttcttaaccaaggagagagagagggaagaatataacttatttgagggaccctactagggaaaaaataaacttatgagtgtattattaattttattctttgggaaaagcataaggtctttggcctcagtagtaccataatgctacttcaataaaagccatatagcagtgtgtgaagctcactaactgactctcctcctttctagttctctcttacctcctggggaggcaacactagtggtttgtttgtgatcttcttccagcctctgcccttacgttaggtcagtattgttcatttaagttttgtgaaagagaaaacaggattttacaatatatggacatataacttgataacttaccatctttccaattaatgtaatgggaacaaaaggcattttaactttttccagcatccaagaattatgcactatttatgagcatagatgcaaacatctgaactctgatgatggttcaatattatttaatacattactgttttcaccacgtccatgaatcaaagcagacagaccacatgccttcttttgaaatatggcaaaacttcttttgataaaattcaacgctcatttataattttaaagtatctccccataaactataaacagaaggatattttcttacgctaaaaattaagatgcatagaaagccagctagcccttaaatggagtgtcagaattctgtgtattactgttttatttttttcctgaaaattattttacaatacaatgaggaaaatgaaaatactaaataaaaaaacaaaggaaataagatattagagaacatccctaaaaatatcaactgagaaattattctaagaaataaaataattcagcaagctggctaagtataagaactatgccaaagtcttattgagtattcctcattgttgctatattgattacagatgtgtaaggagggatataattagtaattctacaaaaaagtatctggagaataaatgccacttttatggataaaatatatttattaaaataaatcatctttgttagatggatctcctaaaagatggcattaataaataaggaaacataaatgcaatagttgagttgggttagtcttggaaacgtggtatgtctttactagccaatatccaaatgaatgcaattaccccagaagtcagaatggcttttaaactatttaaactcctaagcagtaaatgactgaagatgatgaacacaaattagaaaacagaagattgatgtatgttaaaagacataagtaggcggccattgaaaggttcaggcactatgctggcctgcccctgttaactagtgtaatccactcaggcagaaccctggtcagctcagggttccatgggaactaagtctgcacgcaggtgcaaaggacccctttgaaatacaaacccctgcccatttacactttctctttctctctactcttctctctactcttctctctctgctcttctcccaccttcacgctctctctctatgacgaccagccatggcggtcagccattaacactgtttctcttccctcttagtctctctactctgctgggcctatagtaaactggttaatatgtctaatatgtctcatcttgcatcccatcttgcacctcctcttctttatttctaatttaagcaaaagaatagcagccgtaattatcaaaacactattctatatgatgccaagtcagagatagacagaaattagtgtgatggaatggaaatacagagagagattcatatgtaggtaatattgtgttagatgatatttactgttcatctcaggatgttagaccaacatatttcatattggacaaattataaatcacagataatccttgctcagaattctgacagctatggagtccaagatcaaagcatcaggagatttggacccatttcctccctggacagcaccttgttgcttttccctaccaggtggagctcctcgttgctcctccctaccaggtgaaaaggcacaaagctgcctcagcttgctgaatgagggcatgagtcgatccaaggcaaaaggatgatgtctcgtcaccacccccaaagccccaacctcttacagcagtgcagtggatcagacttccacgtgaaagttttacaggaacatagcgattcagtccagagaagatggaataaatttggtaattggtttgctatgttgctactgagaaataagaggagagaggagagagagagagagagagagagagagagagagagagagagagagagagagagagagagagagagaggcaaaaaagtgaaaagagaaagaagacaaaagcggaacacagaaggaaagaagtctgtttaacactgaccacaaagcatgcttgaagggcatggaagaggagtgttggggacaggaaaaatgttcttattgggaaggcaagagtggacagatttggttcaatagaaattccaagccacctgtagcagaaaaagaaacacctataaatattttcagtaaaaattgcagcccatgaatgtcattgccttggggctcttgtattccaaaatctggtcctagcaaacctctcttcttgtcaccttacactctcatcccctcactgctaggtgtccaaggttagcctctctcccaacaagaagtgccatgagcctttctggaaggtgagtactgtccataatttggtaatcattttacagaaccgggatttcaaactctttcctctttagaagtttatgaacagcgaaaaaatttattttcaggtctgcaaacagcactgtgctgaaaggaccttagtgttcagctgcagagaatggtagggggttttgatttgaacacattcccgaaacaaagtatcatactgtcatttaaaataaggctctagggaagagatcaaatccagctccccatctgttttcataaagaaaattctattgtaataaaatagctcacaagttcacttctcatttgtggttggttttttttgttttgtttttttgtttgtttgtttgtttgctttcccgtacaacagtagagttttggcagaccttgtgatgcaagtaagcagaattatttactatggtaacctaaaaacaaacaaacaaacaaacaaaaaaaaaaaccaaaactggccatcttactctagactaccaaccgagtataatctgaaatatatccatattccgtagcaaacattcaccaatgaaatgttgttatgaggtgatgcaaatatccaatgtctttttcttttctcatatttgttttgcacacactttctataattagtatatatttccaaaacatctacctatacatcgataaataatatttaaaaaataagctgtctgaattacactagtacactatttcatgattaagagttcatctgaggtatgcttttatttttgaccttatttaaaccctagcataatacacaaatcttatgtgaacctctatccttagagggtgtttcaaattttccattttctatagctttgctcctttttctctatttggggaaaaaatgtcctctattcagattttgcattcctctactttttgggagaacaaattgccagagtgtttctaggggtataatttggcagcataaataaaaacattgacagggatgagcctatgactgtttatagttgtcacagtaacaggtaggcctatagctctcagtggcctcatcctttctttcgctataattagctttaccttgtggccctgagatggaaactagctcctcacaaatgttggaataatggctcattctgtgtctgctcaaaatgatagtttcatggctggcacctagcttcctgctattacaccaaaagggccagacgagttacagaatctacctagcagctctacattcttacacagtatgccctggattgagcctctaaaaataatctgtttcctctccctaggattgaagtgttttgagtttcccagtattgatgttttgtgtttgcctaaaagtcttacatccccaagtctgcatttctgaaaacttttcccctcccttctttcttttctttttctttctgtttttagaaatgccaagttgtatttggcatatatttaataacatgcagagacagaaaaaataacaacagtccttgcctgatcacacagaagattgcaggcaagcaggggctaggaaaaggctgtggggttttcttgtggtggttgttgccttttcttctccttgggaaaataaaactaagtataaattagcatcaagaaattcgagaagtcttagaattgttttctgatgggtttcatgctaccttcatttatacctggttaaaggagaagaatcaaagaactctgcaagcaaaaaggacacttcaaagtggttgaattttctattacagaatgcagaactgatgatctgagaggtgatacagtcagtcaacacttacagaggaaggtaagaagtcagtgctgactctaggtcctctctcccttctggggtagggagatggatccatttagtgacatgcttactgtagaagccgcaggaactgagttcaggttcccagcacaggagtgaaaagccatgtatggtggcatatgcatgtattggagaggcagagacaggtggatctctgaagctccaggttcagtgagaggatctgtctcaaaaagcagtcaggcggtggtggcccatgcctttaatcccagcactcgggaggcagaggcaggcagatctctgtgagtttgaggccagcctggtctacaaagtgagctccaggacagccaggacttatccagagaaaccctgcctcaaaaaaacaaaagagaaagaaagaaagaaagaaagaaagaaagaaagaaagaaagaaagaaagaaagaaagaaagaaagggagagagagagggggagggagggagggagggagggagaaagagagagagagagagagagagagagagagagagagagagagagaaaggtagagaacatttatggaagatactgagcattcaacctattcattgacctatgaactccacaggcacacacatacatacatacatacatacatacatacatacatacatacatacatacatacatacacatacacatatacacacatacacatgtagggagaaatcctgattagaggtacctcggaccacacctgcttaggcgtcatcagagttatgtaacaagggtttaaaaaggagggagctgcgcaagaagctggctgagctgactaggaagcattttggggtccatcctgctcaggtgcaaacctggtcactggctcccttgcttgagcacttttccccagtaaactacggtttatcaacccatctctgactccactttgtaaacatctacacacacacacacacacacacacacacacacacacaccaataaaatacataaacaaaatgccttctcctccttccctgctcctgcttggccagtgtagcaaggcaaggggtgtacaaccctgaagccgtcacttcacgtcaatgcccttcaagtgagcaatggcatgacaaagacttcttggaccaccttgcagagccagaactgggacaatgatctttcagaccacatcctgagcagttctgttgaatcatgcaaattgcctgcttttgccccaattcttctacataaacttaaaactcatatcagcaccttgaagatggtctttgaacacctttatctgtagctgtattgaatgaatccctgggtgacagaccccagcctgtttggactgctgattcccaggcttttccctaaactacaaaacactattatttcctcatttacaggtaaaggatctgaagagccccagagaagcagagtgggttggctagaatttggaaaccagccctgtttctctcctgaggatctgatcccaactctcccatctcactgcaagcagttctatgaggctgcctctccaacttgcctgctacctagttattggattatctggaatactcttcttttaaaatgatgttgagaggctcagaagatgcctatgtgattgagagccattgctacccttccagatcaaccaactacaattccagcttcagggcatccaatctctgctcgggactcaggactcagtgggcacagacacacacacacacacacacacacacacactttgaaagtgaaattcattccccacatctgtgttctttttttttttaactacaaattttgaagagcatgtggcaatattttgaatgttacctaggtttatttactccctgtttatatgggattcatgttcttaaaacatccttctcttaaacgtctgttatatatcaccaaatttaactgtgtctctaatcaccttctttggaatgatgctttttggttactctgcattgtctcttctttgcctcaagcttgggtgtggacctcactttcatgtaatgggcttaactgaattgtcaccagcttccccatagaccacatagcaacttgcatgactttctggtacccaggtcccctcatcaatcattggcttcacagagctaaaatcctgctcagatgtacagagcgccatgcccacacagcaggcctcacctcctgggactggctctgtgctgtttggagggctgtggaatctcgtcctccagccactgtggagccaacacccttcccccctgggtctgagaacctgtgcttccagttgtggatggctctcctgcagagtcagccttgctctgaaggcttcctctaggaaggagacaggcctggagccagcctgctgagcttggaattgatgggactagagcccaaagccaagaggcatcttttacagccagcttctgagagggaagtgaataagaagtgaataagaccaggcacagagggacacaaactgatgaaagacacaggcacgttgagaggtggacaaaatagaaatcattctttttagggaggatttagggattctttctcattaacctgatgcagcaaggcagaggactctgaaggtgtgtggtccctgtagaattcaggccagcagctctgctcattcttctctccatcttcatttaacacaacaagtctaaaacagtgcgaagaccaaggtcttctgtcagccctatgtgtgttacaagaaagcagggtatggacattactagctactgacaaggatatttcattttttctctgggaagtcgctccttccacactgagaaaacatgctctgtagctttgcttcagtgcccaatggggctgattttgcttttataagataataccatcctccatacccatcaccatcaccttcgcatatgagaagcaatttgctaggcatgatgcagtgaaaataattaaaaggaaacatggtcccaattagtgagaactcaggtgataagacatatatatatatatatatatatatatatatatatatatatatatatatatggagctgggacagtgtgtggcttttaacattttgtcaagaagttacaagacctcctgtgatatccataatctaagacagaaacagtactgaaatggacactgaagggaccagccccctgttttagcagccatgacaggctaatgtgtgctcgcctaaccttgttcctcctgtcctggtcactaggaggtcaaatgccctccttgtggcaaggaaccaatcagaagttggctggtggagctatgctacctggcgggtctgagtgtgctttacatacaagtgactttacaacagtgacttgaggagtatagcaactgccctgggagggcctatgggccataacaaccagttaaccaatcaacacaggacaggtcgccgaagcctggaagcgcaccaatcctgagactctgcataccccaagatactccccttacactatctgatatattcccctgccttatagtttctctccaaccatccaccgagatgatggatgaaaggccctagctaatggggttagctcattaaaacaactacaataaaagactctttgtttttgcatcaaaatgggtctcagtgattttggggtttcagactttgggcataacagatacaatccctatggtactatgaacagatccctaagcagcgtaaacaagtcctacgttgaactatatctaagcaaaacaatataatatagaatacaaggagctgacaccctggccaacatggtgacaaggtgagattgcacaagaccaactactcatttaccttttgtgtgacctgagaattcctggcaagctttgggttcggaagctatttggcagagtgaagaactgaataaacaggctttgaagggtagaaacacttttcaagagcagtttgcaagtgtctgtctttaggttaccatcactcctaccaatatggctgtagctcttgtggttctctagaagaatgaacaggcaaataggaaggatggggaatcaggatgacttcacactggtgcaagggtgaaaccatgtagactatgattagagggcacagcatgatctagagaaaggcaggaagatttggttctatatttgagtctttcaatatgcaacactgtgtattgccttccagcccatgtcatgttgatgctggcctcatccatgccattcagaggtagattgaaaaatctagaagcaccacatccttattcatgaagaatgtctgcagacagacattcttattaccatctgttggcaccgtgccttggttttttagtttgtattttaatactctggtgaaaaaaaaccccttgaaagtcagatgcctgccctctgtatgggaggagtcagtggatatcaaaatataagatgatcaaaagagatctacagaacaaagatggacataaatcagaggcctgtagatcaaagttgggcacagtggcacacacctataatcctagcactgagggggttgtggcaagagggtcagaaatttgaggccagctagggctaaatagtgagagtctgtctgaacacaaatcaaactgtgcatcatcggactctaatggaaggcagacttgcagggaagatggaggtacagcatagggacagtgcaatgaggcagagacactggggaggaactttgctccaagggattgttccaaagaccaagattagttgttctgtcttaacaggcacacccgagtttacctgtgagagtccatccgctctttggttttcaagtgatagtctctaagaagttcattttaatgagtgttaggaaaagccaggtgagaaaaagtagacaaagtgtcctatgcagttctcagtaaagcttgaaagtactggacttcaagggtttcttgaccgccactgaaccagagccacccagccaattaatactgcaatgcatactacataattaggaaaaaattatgaacactaattagagtgaaaaatctttaaacataaaatgaacggaagagagacaacgtgctggtagtgagtaaaacgtaagggaaaaggaggcataatgcttctagatgaagatagggcttgactgtaaaacctgaaaaacagaagtctaggaagggataatgtgtaggtggggttgctccttactcggggaggggactggtgccaggacaggaagatgcaagctccagagagcagtgaagatattcaatgggtagggaaggagggatcttaacatccagactgaatgcacttcacaggaggcagcctgtgtttagtgcaggtcaaatcagataagaatggaagtgaagagggactggagacaagatcccagagaggaatgccaagataataattcaggcagaaggtgatgagaacctgtctctgcaaagatatatagggacgactgttgagaaaagctgcagttgctggagataacagcacacagactgggatctatatcatgggatagaaattctaatcacatctaaatattattgcttttaaatctgggatttggctgtgcctgcattttcatcgtgcaagacatttttttgattggttggctgagttcagggtctgttattgctagttctgtatccagtaatttatttcaaaactgcgtagaatttctgtgttctgccgcttctgtttggtgggaaagaatgtgctatttagctttcctcagtaggaagggtaagaaagggagacggagaggagacagatggctgtttattttatattctgaagttcagcaagctaaggcgggtgcctccatgatcaatgtttttagtaagcctgtctgggaaggaaagaaatagaaattttgtttttcagaaatgatctctgccttttgttcattttaatttgggatctcaacaagtggagattcacaggatttttcttacatgtctattctgatatcaaaaaatcttctaaaaatgaaatttctccctctgaaaattgatctcattgcttttcctctggtgacgtttgagccccttgaacacaaattgtcttcgcagtggagctggaactcagttactgcatgtgtaatgacttgacttcattgctagatttatgatggatggccacttgttcccagttgtctgtcaggctgcaccgaagacactagcccaaggcagagcccttcaacgggactctggagttcataaaagagggaaaattagaattttctatcatcccagaggggagaagtggggagtttaggcatcacatacctacccttagattccttgctgtaaatttccagagatttagaggtttagatttaaatgcatgcatttgaatgtgcctggaaatttagcattttaatgaactgtcttcatcatgaaaggttgacttagcacagaaaaaaaaaaaaaaaagaaaaaaaaaaaagagaagccaagtgattttcctccaaagccaactgggtgccatacgtttttttttttttttttttttttttttttttttttttttttttttttttttttaaacaggttcagagcctatcattgtccatggaagacttggttgtttatttatttactttcagtgtcttcctctgtggcccaggccagccccagccttgaacacatattccttctgccttagcctccctagtgcaggatcgtaggtcgtaccacgactccaggccaacttcttctttagtgtttgcttgtgttagttggaaggaaacatatcagacctggcatcaaactaagtccagaaagtgagaaactaactggagcatggcaaggtgtactatgaaatgttatcttcttaatattacatgacagattgcacccatgaaatcatatcagcaatgagtccttatataatacctgcagaagattaggcccatcaatattccatcatggatacagcagaggctcaaaaggtccacctgttcctgaggagtaaggtagctaatggttatgggagagagagtgtgtcatattcctcgatggttttgccactagtaagttttccttgttcaaaatatgcccccaagctgtattcatgcaagcattccttattaaatggagtaggccacacatacacaaaaagacacaaattgcagggggggagagaatttgggaagagggaggtgttcagtggaagcaaggcagaggtaagaggtgataatgggggagaatatgatcaaagtgtattatatatgtgtaggtataaaattgtgaatgagtacatcttaaaaaaatcacacagtattagcagcattcgcctctgcagtgtcaacagtaacttcgttcaaaggtttgactccttgcataaatacctcgtggagggacctaagggaacccttccagatgtgtacctatgaagagtataaactcaggaacagccaagccaaagaatgtatgctggcatctccacatggcaagctaaggactttgaaatctttgttatatcagggtatgtaaacttcatctaaaccaagtcagcatactctaccggcattcaaattatcaaaccagaagttaaaacctgaaggacttcagtcttcaagacagtgtggaggactttctaccatatacctgtcaacagcacctaaattatttttaaatgacagtaacaaaacaattagaagatttcctttatcaatagtcttctgattatgcttttaaaggcatttggttatgttaataatagaatatataaatcaccttttccctccaatcagggtctgaactactggcatttttttcttttgttaaaattgtatttttaaattttattctccaaaaaatttcacacagatatgcaaagtttcttaattatatccatccattatccctgtccagatctcttgtgcccctcaaacacacgtttctcctaactgcatacccaccccacgcaaaagatttctgtttgttctagtagttttaatctgttcttcctgaagttgctcctctctcttagacacaccttcttctctaatttccagactgctttgtgctctttctgcagtgtgcatttcttttctttttcctattgttatgaatgctctgttttttccatgaatttttccaggattatgacttttctacattttccccctcttaatttctgggttatttgatttgcttttccattcttcatactaattttacttttcatactttttcagtacatttattattcttttttctacacacacacacacacacacatacacacacacacgtatatacatatgtatgtgtatatatagacatatatgtgtacttatacacagacaaattttcaagtgtactatagatatgtatgtatattgacatatagctatgtatatatacatacagatttgtataggcacggatagatatgtaaagacaaatatagatatacatgcacatatagatatgtataggtgttgtggggtaatatttttgtagagcgtgaagatgtatctttacaaggacatcttctgattgatttaataaaaagctggatggccaatagctaagcaggttttccaggcacagaaaatgctgggggaaaaaaagggaggagactccaaaggacacagagcaagcagcaggagcattacaaagtaaaggtaactgaggcacataaaagaatgtagcttagacacctgcctgatgggggtcttctcagatggggtccagtctgtggggacccttgaagccccagtagtcgagaagaaagccagccagatccttaggcctagactcctgggaagacagccacacccacctgatgcagggcagtaatttcttctacttcattggaagcccagttcttggttttggatcactacatagacacacaatcacacctcagttggtccacacacagttaaacttccacaatctgatcccttcagtcaccttcttaagtcttttgttggcgctctgtagaaatcctgacatcccagactctcccctagacattattttatttccttcaatagcctatgtcttcccacccttcagtccatttcctccagggccttttcaagaggaagctggccatgttcccacctctattcatatgccaggcccccaacacaggcttccctttctccctattggtgtatctataccatttgtgcactgactttcaactaggacccgaagtcgtcaataattaccacttttgtttttatcacttgtcaacattctgataaattactatcagtatcagcaaatggcagttttggcctgttctttttttctttttgtcatttttgaggcctgaacttcagttgcctccccacttatgaccttttaaaaatggttttcattgtacacacacgttgtgtctccttcaaatcaagttaaacatatttatcactgggaacttttatcatttccttatggttaaaactttcagaatgtttccttctacttttgaagcattcagttactacggatcatttccactcaccccactgtgtgcaagcatgcccctatgagaccttttcctctttctttcccaaggttacactctcctacacttcccagatatttagttactccatctcctcagctgagcaacttgaaacagtctgtgaagggttgcacaaccatgatacatgagtacatcttaaagctccaattaagagccgggaggtagtggaacatgcctttaatcccagcgttcgggaggtagaggcaggcgaatctctgtgagttcgaggccagcctggtctacaaagttacacagagaaaccctgtgtcaaaaaaaaaaaaaaaaaaaaaaaaaaaaaaaaactctaattaagaaacataatagagtcatacagttctgcctcgatggtcacctctttgtctttccctttgttttcctatatccggtacctggactcttcttactttcggatgttgaccaaagtttatgctttgcctagactgcgtgtctgttaatgttattcaactattttaaccactggagtcagcacccatagccacttttctcctcttacagtggaataggagccatactcctatctaaggcaacctttctcttgtatgacctggagccctcatcccttcttcaagatccatatactaacagctgtctcctcaacaaaacaaatgggacaacaaaaatgaaaacttgatttgcatttcataaaagttccctcaactgcacttttcttatcacaccactgaaagtgcacacgcctcacctggaagcttcttctatcccaaagtgttctttctagcacattgtcatatcctcttcattgcatttttcactatcataagttgtattaaccactgtttacactcttatcacaatcttctacttgaaagaaagcaagatcaacagggggatatatacatctcgcttcattataatcacatttttaaagaaacagggttggccaggcgttggtggtgcatgcctttaatcccagcactgtgaacgtctttgcataaataactcaatactctgctctttctgctacaactgagtaagtcccctcagaaggtggtcttaagaggtggaggtggagagctcaattgtcgtttctggaggaactgggattgatagcactttgctgtgacagacacttctgcaggagccagaccaagaagcaaatataggtctcagtggtacttgtgatgagaaagaatgggttccatgagctcaagaccagttagactaagagcttgggtcttgggggctttcacttcatgggcagagtttccacagatgcacagtgcagatacagtgtgtgcacagagatttttaaatacgatgagacaggcttttagatgcttgactctatgtagtgttgggatgctaagactgacatgagcatttgaaaaggtgaacaatgtcatggccaactacaccttaacataatgacccttgatatttttattaacagtactcatttcaaccagttatagtgggtgaatcactgaacagaaagatcctttggacttggcccttggcagggaaagactttccctgccaaagatattttcacccaatatttcaattacacaagtgtcaaaatatgtcatttggagcatagtattttcagctcacacaaaattacttcttttggaaataatatttatagactatagaatatgtcattaattagctttattttaaaattagaaaactaagacaaatgtgtgcattgtgttatgtctgccaaactctagttttataatacaattaatttctgtgattgtaactaatcttcattgttaatgataataaagttctgtcaggtgggtagacatatagatgaacaaaaatgaaaccaagaaaattattagtaaatatgcacaccacaggggtcatggtccggcactctcatccacttattggcattgttagatttcataaaattaccaatttccataaagttactggtattttgtccttccttttcttgatgttggtaagatactaaatgcatttttaaagtaagatttacattagcaatatggagtgaaaaatatatcatgccaacccatcctgactgaggagaacagcatcctcgttgtagatcaatgcatgaagacaaaatacattttgtgcgtatattactagatcccaaatgtgtggtcagaggattccaccccagcagccaaagtcctgtaagtcctctatttcaaaagttgctatacatgaatatgcttttcaaccaatcctgtggtctctgctgtccactttagatggttaatactagaagcactggaggataaaacctctgttttcacaacacagctctgggaagtgagaaacctatcaggtaggagggtaaaatcaaagatggactgtgtaagccaccagcagagccatcactatcagaacaagtgactggaagatgaaaagtgagttgagttgccaatgagatgaacttgtgctcaagttcgatccatttctgtggccagcaactagaggaaatgaaatcaagtcttccctgcaaactccagaaatcagcaggcagaagaacaacaagaaaagataggttaagaaaagaaaatcagggcacatctgcatttttcaaaggccaaagggcggcagtgtttggaaacctggatttgggatatgccaaggaagacaacttctttttctaattactttttatttgaattaaaaacaatcttattttacataccaatccctgttccctctccctcctgttcaccagtccccctaccatcccctcatcccacccccacccccaagacaacttctaagctgagaactaaacgggctctgaagtgaacttcattcgttttgtttgagagttggcattagaagtcacattataatgagcctctaaaaaatgaattcatccaatggaaatagaaacactaaaagggcctgaacatgactgcaaatgaaggaatcaggccaggaaaagggaggaagaacgctagagcgatgtcctcatcatcgttggggcttcgctgccctagaatctcaaacaccagttattgttttaaatatttaaataaagcatttgtgttagacagtcaagggttcagacagcttcaatactgtcgaaagctaattttcgcagtgcagtttgttgccctgtccacaattgtaaaatggagtacataaccacagtatagaggaaaattcatttgaagtcctgaaaatgtggccatggtccattcacaatggtagttgggtggtggaaatccacagttgcgataccgggagatttcctagggactagaacgctgcagatctcacacccacatttgtcttccctatggggagccagggtcccctgcttgctagcaacagagagtacagcagatggcagcaggcagctgttgcatgtgccgagcttatcatttccaaaccaggggaatcctggtggaaggaaggttcaaaggggagttgatttgctggatttcaatgttttctgtctctttttttctgtctccacttctcttctgtctagagaggaagaggcattccaactctaaggagcacattaaaccatcataaggggctagacaagagcacaggtttgttcttgaaggctgagccctacctgaggctgaatagtgactgagggaggccacactccacgccctgtcctgttgttttcttcacttctcggccttcagggggtattgaaaatcactggacatgcatctccgaatactaatccaatgccaaattctttgtagggtatgtccattcactctaactgtcagtcttacaccagcagctacaaggaggtcacaggtagcaggaaagcctgagagcccccagctctcagcccaggagctagagataagcttggattctaactcagcctctgcagaccacagcagagctgtcaaagcgccatgtacttctctgagcccctgcctttaaacttgtcctgtttaactcagctcagaagcctggaatttgtgaaagtaaacatctcttatcccttggataagctggataatgcaatttaaaatacagacgtctattcctcggacaaacacaactgccctgacgttaatggggccatttatctgtgttgaagttggtaagccatgagcactgtcagtgatgttgggatttggggatctgattagctttgtagttcaagtgaccagcaggaacagtgggtgtgacatgagatggtttcttctatcttttggggtcattagataacaagaacctttactcctttgtgctaagatctggaaggtaagattttttttttccggacttgaacaacctggtttatttttcataactaccaagctgtgcttcagccactcattctgtttatgatcagctactccaaagctgttacctcggacaaacacaacttgaaatttctacaagaatggtcctataggaaactaggattacaggttttagcaccaactctttggattcagaatatttaaaatatcttctgtactgaatgcattcaaaactacccagtcttcctgcctggttcactaacttgaagttcaaactttcctgcacaatgaccttgactgtcttaggtgatcttatcacataaataaggcaatcatagtaccaaaaacacagctggtggaatttcaaatatcgggttcatacaaagaatgttaaaatagagttcagaggcaaacactccccaatacatttgcaaagtggggatattcgcagtcacctcatgttttagcagaagttggatgacaataagaatgtttttcctcccctgtatcatttctggaatggaccatttggctaaatctctggtttcctagcagtaactgattagctaactgatttctatctatcctacttaagaattatgaaatagtgaaaatgtcaacctattggcaaaagggaaaaaaatcaaaatcaccaagagatattccttagcagtctttcaaaatattttaaaatcacttaggaaaaacttcaacttgcaaactttgaactttatttcagttccgttgtccttcagtccaactgtagagaaagaaatcctcaggagaattgatggaaagccataggagaccttgggctgttgtctttagctcagtgatgtacatatacactttgggaagaatatcaggctacaggttacttggagagtcttgtgatatttatctagtcatacttggagcacaaaccaaaccagacccctttagcacaacatctttctttcttttttttttttttttttgccttttttagctcactgacttgactggatgactgggcagcaagacaacaggatgtactccctgcaagcaaccaccacgacagggcccaccctcaccactagggttgctgaagaatgtcaccatgcctgacactttatttgggtgctgggctagacacagattttcatgtttgcatggcaaactctctgccaactgactcatctctccagtcctgaatcacagacatcctaaaagttccctggagctgaagagcaaattctttatgcatttaatgttttttacccattaaaggacattttacttctccagttgaagtgagctacaaaagcagataccctttaaaataagcctgaatttactattgtatatgagagtgggctgatacaaagcagagcgaggagaccagctttccagagtgtacccacttgaaatcccccaacgagcacatgatttgtccagattcctctgagccaggatactgtgtacattttagagtaaaggaaaaattgaatattttttaaactttcccagaaatagataagaactgattataaaagaaaaaaatcacataccacttgggactctgacactgtcctgccagcccgagaggaaggagatgagaagccagacacagagttctgcttttctcaaagtcacccagacacaaacaagagtaaaataaaagacatggaatgcagaaaaacatgatctctttgcattgagcaatttagagaggtagaaatatatgatagtaggcgagcagcaaagacctaagactgcaggatatatatatatatatatatatgttgtgttattatatatattaaataatatatatgcacatacatatttgcagaagctgtgcacatttggagaaaaagcagctgtcactcaagtgcatctttaccttgtggagcgcagcctttctctgagaatccatggacagcagagtcttttagccagaagatgtgtaaaggcatgtgtgcatgcatctgaacataggtctgcattttgtttggtttgtgaaatgtcactgatacttacattgcttgtacaacacactagtcactcctgcatcaaatggtttctgagtccttgctttgctttcttttctgtctcgacatcagctttgtaaatgaccggacaggtaaagagaggcaaggctattagtgagggaataaggtcagctgtgtgctaaggaaatattagtggtggatcaatgcctcccagcctgcttccaaggaaaaataagagtaaataaagtagccaactgaagatcgtgatataccaagaagcagttaattctaaatttctttcattgtgaattggcaattaagcacattgacatttttactgtatttccactaactggtagcaattttttcaaaccattaagatctgaaaagtattacatgactgtgtcattgttatgttttttatttaagacagttacctggcatggcatgaaacagtatctcccaacctcttaaacaactatttctcaatcctattttgcactgggaatggcctagtggtctggtaatgttccagaggtaaaagaagaagaaaacatgtttaagagcacttctgaagccagtgagtcccagtgttaagatggaaatcctaatccaaagagcagagtgacttactacagctagtcacagagaaacatgggatcccagatgggaaatccaggaacaagaggcagagataccagaactttctttggcaaatataaaacacaggctgtacccagagcctagttccaggttttgctaaatgagaatttcatggcaaaggatcaagagcctgcagaagcatttggtctgtaacccagatactacccagtgtccctttcctgttgttctgctaggaactactcatactgaaagccagaatgtagagattaataaaaacccaccaccagacagcagtggggtctagtctctgaccaccagggagtcaataagattgagcctgtatcagctaccagagcctgagaaatagaaattgcttgaacccgcatctcgttaagagaactcctcctgatgtgtcagtgtccttagtcatgagcacagagaggtcacctaaaatgatctgtctgttcagttcttcactagcaggctaatcatctttgctgagttctctgaagtttccagataaacaaggtcaggttaacagtcttccaaaccatccaggtatcttttctcctgctctggtaatgttgcacaacaggagaaaggggcctgtctgagtatttaccacttctaggcttacatatgtatctagaattgctaataggacagaaagtgaagtgagaacattgttctgggagtggagagtccatgtgaaaaccaagaccagagccttgtgtacaagtccttgatttttcagagtgaaaacagaagctaaagactaattagcagttagcatggtagatctggatagcagatatcctatatgccttgcaaggatcgtataaactcttgtgtggtttggcaaaaaagtgaaaaggagggtgcccaagtcacaagcctgtgctgactgccaactgagatatttcttagtcttttctctttgggtcagctaaagatgatattagatttgaagtggtgaagagcaaggtgtctggtctgagttccaaatgtgctcattgtcttcagcacaaagacctctccgatctgtgttattctaacacatgcagcgaacgtctctgttgcaccaactactttctttaggagggcacacatggtccacactcagaaaactctgcccctcagtgtcttgtcaaagccacatagaagtgtgacctgcttttcttaaaagggagtgaacaatacaggcatccaccaacaattccctagtttcaaaagataatggtgtgcttggtgtaaaacacagtctcgctaattccatgagccactcactttagactacagagcactgattgttactggtgcttgtcatggatctcctttccacaggatggtcattgccaccatctgagaccttgtgtatgggggtttatgcaggtgagtcccacagcattcacactcagcctaagtagcagaccaagacttcatggtcagactataatcaagaaatatatctataggtgaggatacccacacagtcatttcaatgaaattctactactggtctcccatggcagctagaactgaagttacgcagccggtgccagctgctgtgcacaagtggtagcctcacccccattggaggcacgtaacttggttccaaaacccaccaccagacaacagtctctgaccaccagggaatcaataagattgaacctgtatcagctaccagagcctgagaaatagaaattgcttgaacccgaatctcgttaagagaactcctcctgatgtgtcagtgtccttagtcatgagcagagagaagtctttgaaaacatgttgatagtgtctgccatagttcagatctaaaatgtttcctagtcattcgtgtgtcaaagcttggtccccaattcacagtgcttttaggaggtaggacccagtaggggaagttacattatcaggagcagactcttgaaggggacatccagccccaggtccatgttcttcctcacatgcctttcttttgctatctggcccctccaccacacccagccaccatgatgaatgggtttcagccccagtacaaggccagctgatgaggggctgaaatccccactgaaagtctcatgtgataaaaagtatttgtgtatgtatgcaaggactttcataaacatgatatttttcttaaaaatttaatcatacggttatacattagattgggatttttttttattttggttacgagcctagcctttaatggctgagctatccctcaagtcctgtattggaatttttaaaatagaatttgaatcccctggcaatgggcaaaaaatatatatcaaatttggctttaccatttttttgtatgttgcatttgctttcactggtgtctactgttaattttattatttcacttgtaaattctttcctttgtttaatttgctgtcaatgattagcttatttgtggattgtaggggattgtttttttttgttgttgttgttttttaggatttctccctctttcttctctccttgttttctgcctctctcctttttcttttctattttctcctttctttcaagtgtcatgaccatgttaggcaaacattgaatacatcattgagccacattcccagccatgaaacagttccttatttactgatattttaattccagtttggatgtcatcctaaactcctggaccgtttagaaacagactgcctaattttcgattctctgtggattttctagctgtttaccaggggattcatcgggagactttaagtatttaagcaagtcttctgctttggcacactcggaacttgtcctccgatcttcccatcacttccagatgccctggcctcccctcagctcgtcagcctcccccttaggaatctattgccccacccaggtgcatgttaacaagactgtcaagaaaacttgtatatagaatttcaggctcagatttctgaagttctattgtttctgcctgggatatgattcatagtaagaaggtgtggtggaagagctggtctcagccctcacccccagaagactctgggagccccgagtagctcccctgcacttcaaggaagggacagatctaatcagaaaccaaaggtaactgtggtgctcagcttggtgttttcctgactctgggattttgaccccatccactccaggttcccttcgtcatttctcagtgccatcaagcagttgtccactataccaagctttcatagtggcgccaagcatgcagtttagtttcagagaaactgcatacctgtcactatggccaaaggtatagtggatgcaggaactttacaagacctggtgtggctcaatgtgccctctcaggcttttgtgttgcatccgaacaataatgctagtggacatgcagcacagcagcttccacgcccaggcacggatctacagcttaaagtggaacttcccaacctcacctcagtgagctaagatacccaagccacctgcagattcatgaatggatgattcatgtcctcaggtacagagagcaaagcaccccagcccaccagcgagttcttgacagtaaattaatgtgattccaagtaacagactatgggtgctatgcatcattattctggaaagataaaaattcaaactgataaacagaggctgccttccctcccacccacagcaggactgacttctggagaatacaccattgccttgaaagtgggggtgtgggctaagggatgctatccctgcctctcacttaatactagaaagaactgcttgtctggaggcagcatagcttatgaatatgaatatgaatatagctgtttttaatggattgttttcaataaatggaaagaaaagggctcaatatataaaaattcacccttaacaatcactagaaagtaaatgtgttgagtaaaatgatagcaggataattttgagtatcgctaatttttacctcaagtaagaagagttattgtcctaagagaatgggaaaattatcactttacatgtctataggctatttgaagcaaatctagcctcagctcacaagtgtagaagaaccaaatacagaatctggacacagtctactaattttttgccatgcctgagaattgctttactaatcttgaaacatcctgttgtctaagtaatacaaacagtgagctgcctataagccaccacaagtactgagtttacagggaggaagtggtgttagcacaggattttaactctagtggctttcttgagtttaaaaatgaaaatcatctccacaatatcacattcagaattcgagtatgctggctgtgggatccccaagaaagattattgctcacaataggcttcaatattcttcagagaaatctgatactttcaccaaagcatggagtttcaggctttcggaggcagaggaggcctccaggaatcttaaagctctggacttaagtgaaaaaaagcttcaaacttcagagcacaggactgcaaacctttgaggggttcttgttggcttctccgtgctagacaactaagcacgtttaataaatgataaacttgttaattttttattttaaagtagcaaagagcatttgacagtggatcttttgaccattttgttatgaaggagacccaagaaacaaatggctaatattctcatcacaaaattctgtgaaagtggaatgtcaaatacagggtaaagtcccctggcttctgtttttagtcagaaagagctgaaaactatcttcagctaaaacaggaagtccctccactcctccctccattccttcttcctcttcccctccctccctccctcccttcctccctccctccttccctccctccctctttctttccttgccttccttttctaagagaccctggactggaaaactcaagctattcccctgtctcagctgccaatagcagttggcatatgctaccagcagatgtggctgaagtcatttttctttccctctgtgaattcctgtctattcttagaattacagttcaagtgatgggaaacctccctgtgcagtattggtcaaggaagccctagaggtcaccaaaacagcacacaccattgctcttggtaacaggctaaagctacacattaagatcctgtcactgaggtcaccacatactttggctacaggatatgagaaaccagtctcaatcaaccaggaagctctctcctagatggctagcttttaaagtgtcaaaaggtgttagatatgttgcagggggagaaaagatatcgtggtcttacccagtactggaccctgaaggctacaatcctcacttgccaggaaataggtgctcacagtgcaatagtggcatgcctgttatagggtatctaatggctttctgattggattagaggcatgttccacaggaagtaatatcatgactggtactataaccctggtgaaaagtctatggctatggcggtcatatgccctatagtagaaccagctactgttatttttctaaatggtcactttgccaggttattttctaaacatttatattcatgcccataggcctgagctgctctcagtcttggtcaggtaagtttctttttgagaagggttacagtcagtacagacactagtaattttttaaaggtctggaaataagtgactgagttctcagtcctatattggaaatggaatcttttgggcatttcatgacatgaccatcaagtcagtcaaaagtctgatacagaagcaagaggttctcttccaccctatcctttggtgaagagctatgggcaggttatagatatttggggagaatcattcatttttttgagtgttccactggtaggtagtactgattggacttagtgggctatcaaagagaaaaataactaaaaagatatgtatgatgtttgtaaggggacatgctgagaagaaatggcaagtcaaaagagggaaatatggggtgtatatttccatctttcattgtataagtgtatgaaattccaaagaataaaaaataacaaaaaatacttgaaaaacatccactgttctgataaacatttgtgaattcacacataaaagaatctggagttaaagtttcaggagttgcaagttctcttaaattagttgtaaatgtctaagtgtatgcaaatttttctctcaagagtttccagggctttcaacagattctcaaggggaccaaaagaatgttaaaaatggacctaacgatgtagctcagttagtagactacttgtttggcatacacaaagccactgcataaagtaggcaccatgaccaataagtagaatcaacacttgggatatagaagcaggagaaccagaagactaaagtcatccttaggtacatggcaagttcagtaccaccaggggctacacaggactgcctcacatatgattaaaatgaaaaaaaaaaaaacctaaatttatacaagatgaaaaactattatttagaaactggaagctcctcttgggggaaaaatgccaaattgtcacaactatctagggttctggtcgcatctctcactagcttccctgaccctctgtttcctaatttgaagatggaggagttgggactagaggaatgaattttaaatcatgtccagctgttaactttgtagtgctactagggactcctataaaagcttaaacaacaaaaataagcccacagagtatttggctagtaattcttaaagcatatttttaaaaacgactattttatgtttgcaagtgtgttgtatgtccttgtgtgtctgtatgtggaggaatgcaagcatattacatctgtgctcctgtggagggcagaagccagtgttctgatacctccctctgtcagtaggcaacttttttatagcaggtttgtacactaaacccaaagctctctgattgcaatagactgacaagctcagaaagtgtacttgatcctgctgtccccaccttgcagcacaaacacagtcacgcatttctattcgtagaattttacatggtttgaaggaagcaaactcaaatcttcatgtatgcacagggggtgttttacctatccccaagataggacaacaatataatcaatgaagtatttaaactggaaatcaaactatgtgttctgaataacctgtcatcatatgtcaatgtcttatatccagaaagttagatgtttggtttcacatgaaattcttagacaggtttacatcctctactgtttaaatacttttctgttatagtgcttcctatgatgttcaaatacttaatgatcaaacgcaaacattgtggctgcccattgagatgagataagcaaactaagaggcaaaaagacggcatgagcgcaaggctgctccaatctaaacatgtggttgagaggaaagaaaacaattcttgtgccttctaaaatacttgttataacttagcagtgggtccatcaaaatgtggctggagatgagtggggatgatccctgtaaagagtagaaagagaagccggcaatgaagctggccaggcttacaatgtgggagacccgtgtttattttctctcagaggccatctaggcccgttcgtcagcgccctgggataagcctgtaaatatttactatcttcttggctcaaccactggacaagtgactgaaaactactctcttcatatgactggagtttggacccacatctgacatctccaagacattctaaataattgattaatcacatcctgaggaattatttttaaaatcaaggggaatgttcagcattcagatcaaattattgtgccacatgcatccgacagactcttggtgagtcatcttgagatgaggatataagtagggatggctttttttttttaacgaatcccaggtatttattcaccaaacctataagtgccgtcaaacagaaggctttttaaaacttatttaagttttgagctccacaggctatgaggctacagccttgtaggtccttggtcaagtcatacacaggtgtggaaacaggacattttaaaaaggaaaactctgtgtacatcagagcaatctgtatggataagttcttacatgcaacaacacaacattcttttactaaatgatacttttcttctttttgaagacctagaaatttttgaaagaaacaaagaatagccatttgtacttcttgctcctacatgttcagcatccttcctaaacatggaagttcacacctgtaattacaacactccagaggcttatgcaggaggattgatatgagtttgaggttggcctggactacaaaacaagactgtctcagacaaacaaacaaaaaatgtctgaagttttaaacaaaagatcaacctgaacatttatagaaaatttaagttgacataaatgctattatataaacgtttgttttcagatgaatcgtgacctaaccaagaagggatggcaaaggccatttctgaaatcagtcactccacatgcaaccgctattttccatttggtcactgtcattttttatgtgttttgtgataacaaattataaatctacaaggaaggtaagaattgttttaaaaatgtgtaactttgtagttacaagattttcacatgaaaattgacatttcaaaatatgtgataaattatatactattttaaatgaaatacaaaatacttaacaggtcattctattatgagatataaatcacaaacatatactatttttacattttcatgtgttcttaaaaattatacccttttaacaacaagtcattgtttcattcatttctacatactttacttcaaatagtatcattaactaacactctcaatgtatttcttaaattaaaaaaataaaatcacagtaaattatatactagtgtagtcttcatcaataaaatctcaaataccttcattaagatattttaaatgtataaatgtactgtgggttcatgttctatcttgtctgtttgcttttgagacaaggtctcaggtaccccaagctgatctcaagtttactgaatgtggtggtttgaatgataatggtccttgtaggctcatatgtttgagtgcttggtcttcagttgggaaggatcaggagatgtggccttgttggagagttgtgtcactggaggcaggctttgtgtctctctccttcctgcttgtggatcaaaatgtgaactctcagctgtttctgccccatgcccttgtcccaccatcatggactctaatattctgaaaccatagacccaaccaaacactttcttttatatgttgcctttctcgtggtgttttgtgacagcaatagaaagcctaacaaagatatccaagaattgtcttgaacttttcttatcctcctgcctgaacctctcaagtgctgagattatagacatatgccacaatactcaagttctactttcaacatgtattagctttatcattttaagaaactatttaaaccatgttcccaaaccataccaagatgctccaagaatcaccatatttttaattttcaatggtagcacagagatacatcttttcaatacagtgccagttgcatcgacattcaattatcctatattctttccagtgacaccatccacatctttgtaaagttcggctgtcaaaaagtaccagttagaaattggtacaaatggagaagtcatgtattcaatcttgaagcaaagtttatgagttgtgtagtgctcaagagacaggcatatcccattggtagttgtggttatctgatagttgtggttatctgatagagataagaatgttaatattgattcaactatgtataatacattttaagtagttgtgaagtttctgagacataagcacttacaattttgaacataacaatgtataaaggaagcgcacgtttagttgtatgatagattagtgtatgtcatatacaacactaaagacacaattaatcaaaaatttgtatgaatctctgacctccccattgctgatatattttcctcacctgtaaaattaatttgctacctatttccaaacattgttgcagtgtataagggatgagaaagcatccaacattgtgactacataaattttaactctttgttgtcataaatcaaggattgaaattttcattttttaaatattacataaaaatatttttctttgctatcttgttatgttaccatttatgttcatgtttatatatgttcatatgcatgcatgttcatgtgaggccaaaaggcaatctcagatatcctttcttgagcactatctttttattgtcttttttttttgtaagtagttgatggtggagctcaaacacaaccagaatggtagacagcaagcagatgcactgtcaaagtaaccactgagttaaagtcagtcctattgtctcttttttttttaagccaaagcctctcactggccagggactcaccaattaggctaggcaggctagccagaaagggttggagatccacatggctttacttccatactgggattatcaattcacaccaccatgcctgatttttttaaagtaagttctagaggtcaaactctggtcctcatgctttcaaagtaggccctttactgactgagccatctcccaaccctgtactgctacctccttatttgaaataaattagttcttctatctagtcatacctggaatattaataatcataaatgcaaactataaaataaaagaaaatatttcattaattatcaaacacaaactacaatatgtttatcctagtcttaatatttatatgacatttggaatcaataattcctacacattatgaatagaaactgttagtcagaatatatcattaaatagaatcctctacttccttgaaaattcatttgtaattgatttcaaattcattccattaacactgtatcctaaagcattatagctatgatagatggttggaggatgtgtggaattgccacatgaatttctttgctgtttcagtgagaatatggtcaaagaaaaccttcggtgtagaagctggtagtttgtagctctaggctcatcttggtaagtgacttcaaatcagttggcttccccagttatcaacttgtttcctctctgtgaagaacatagcaaccactctgggcaattcttgcttcaagttcagcaacactgctgtcatgtgcagcaccagctttcccttctgctgccatctttcttagtttttggctcacttcttcttgctccaggacaaagtggtcttccattgttatcccttgtctcaaatggatattattgaactcgtttgtgggtcggtcagcggaaagggatggaagagtggggtgctaccagatttcgtgatggctttttaatactctaggttacttgctttgaaattgagttgatatgctaatgagtattggtagagatgaggattgaagcaaagaaccacgcctatcttcaggaaagaaatcaacactgagcagagttaacttcctgacgattttaagttagttaatttatgattgctggagaacttatcgtgaagtagctgttgtttttctattttgaagttttcctaataatttattggaaaaatattgcttagtgaatattgactgcatgtcaggcaatatatatgaaaaactttcaggtatgtagtatgctaaacacttaaaggaaggggaaaaatctatgtgaaaagagatacactatattcttggaagtcaaacttgcctattataaggtcacattttaatgccatttgttttgtttgatttattaactatattgacattcaaatttgaaacttttgataaccaaacaatataataatgcctttttatgtagaaattttctgggtgtgatatgaatagcctgtaactgtaatgaggtgatctcattgaaccccaaaagcaagagagaagaaatgacaatgcactactttaaggtacaatctaccatgccattttatgtgatgctagggattgagcacagaggactcatgcatgccaggcaagcaatctaccaactcagatgtagcctaagaccttcaaattcttataaaacatgaagaaggaaaaggagaaggcagcaggtggtcaactaaatttaacaatcaactttatttgtcaattatcttcccaatcatatggaactctgcacactacactcgtgatgttgaatataacaagaaatttcaatatgttacatgaaagtcatctcctgttctttcatttaaaactcttcctttccatattctcagttttgagcttcaaaatctagaaaaggaacaaggaaaggaaacagagactgagaaagacatttccttatgcacactaaggaggatgaagaagaacacatgtttacatgaactttgttaaaaagggggctactcagggtctcctaggaaccaaaccacctctcattttgtgaagagatgggaaggaagagaccagatcctcaggtagaaagtaccatggtggtacctgggaagagaggggtgacattgcaggctgactgtgggaagctgcctgaaatgatgcaatagaaggtaaactaaagagacaccatgcatttgagaggcacaaaacacatgtgactataagggggaaaggtgagtggggatccagtaggctctggtatctcatgtgagatttgaggatgtactttctcttgactgtgatcatgtaaaagggatgaaaaggactgggatgccaaaatataaaacaactttcaacaatcgtatacagtcacagatgattcaaatgtttatgtctggatagtgtgtttgtgttgctgaatatatgtgacaccttaattacaaacagaagatgaatgaactctagtatcaaaaaacagggcaaaacgcttaaggactataaatagaagacaatgtaaccaagggaaattccctaggattggatggagataatttgtgagacagtgtggaggtgaaggtgtctgtgagaaagctgaggcaggagaagagtctacagaggagtcagggaaaacatgcaagggaaagaatatgagaccaagataatgtcatcagtcactgtgagctcaatgccatgcaacatctgtgaacaattccagcaagaggcagcttcgagaccttatgctcaattgcttcttgggttgtccaaagttcacctcttgaaggagacaggccagctgcatgatgtgattctgaatacagaaccttgacattccaacaaaccacatgaatcagaattcatttccgtgtaatgctattgatgatagggatacgtgtcacaaaagacaagcctgtaggtgagtcacggagttgatcttaagtattgctaaaggggtcactggatgacctttgagatcatcctaattgggcctttctctctagaccattaggacactgtgatgtttggcttcttcagagtatgtgatttgtcttattctgacagataattttgaaacgtattacccaccaaagcctttctttcaggagtgccttagagctggaaaccttagaagccattggtagttcttatggtaagggaatccatctttatgccttgattacttagtgtcgtaacctccatactatgtccttgtttctcttttctttctctgctgttcctcctcaacttattgcattgtcttcccatagtctgtgaaacttagtaaatgaccctgagcatttgttagtataagcaatagtattaaggcaatggaattaataatgactaagtgctaagtgttttccttcttatttacctatcctgttacctagcatggaaaggaactctaagggagatagacaagaacaaagtctgttttgaaagaatgtggagattacggggactgttctatgtatctatctatgtatctatgtatctatgtatctatgtatctatctatctatctatctatctatctatctatctatctacctacctatctatctattgatttatatttatatatctaatctagcatctatctatatctatctacctatctctatctatcatctagctagctagataatctatccatggctccatctctctatctatatctttaatacctaacgtctatcactctatctacatatctatcactatatataagtttatataatctatttatttgtgtgtgtgtgtgtgtgtgtgtgtgtgagtgagtgtgtgtatgtgcgtgatatgattgtgtcaggtgtgtgtgccacagtgtgcatgtgtaggtcaataagacaactttacagagtcaaatctctttccctaccttaacataggttctagggttccaggattttacaccaagcaccttttccttttcattagccctagaagttgtgtttgttgattcattttatggatataattttgaaaatatcccagcagattgtcaaaagttgtagcatcagaactctccaaacatggacaattccttccgtggtggaagtaacaggaaagatcagacgaattaaaagaaataaatttaaatgaaaaccagaacagaagtaacagtatatgagagaaaggaatagatactcaatttaagcatttcttgctcaattctgaaaatatatgactattataggtaggctatcccacttccaataaagtagaaccctcctactaacattgtagaatcaattgagataaagaatgctggatggaattcctgccctttcacaatttcctggacttacaggacatgtgtacaaggaggaaagaatgttttctgttattaaagacagaaagtgctcagtaagataagaaaaaccaacccatgacaccacatggacttacaacagaagcaacaaaagaaactattcttgtacacaatggagctgaccatcaatccagacctatattatatgctttactaaatttgtgataaataaaatgacaccacaatgtgctttcaatcatctgtcagctcctgtccctgatgaatgatgtggaaaccagctactactcttggtctcccttttcatgtaatatctctattctcttttgattctgagtcaaaagaacacacacgtgagcacatctctgtgactccagaagctacaggaaatgtgaaatgatggggattcctaatgctccagcgagattttgaagtcattggacagaaaatcctcatgacctactgtgttctcaattcttggaagaaaagagtaaagtatgttcaaccccacccacagacctcttgataagaatccttaatgtgtgtttattacttgtcgtgctctgttccggttgatacatgccacctaagtcatttaaacctcatatcattctgtattgtctctattttatagatgaagaaattgagtacctaaattgaaacaacttgaagtgtcagtttccactctaaaatatgatacagttgaaagttccatttgccagctttctgttactgtgacaaaatgcttgagaaaatcaacttaaggagggatttgttttagctcacagtttgaaaggcttcagactgtgaacttggttccacttattcaccagaattgtcatgaaggtgaagagttggtggaataactgctcatctttcccagaaaggcaaaggaagatggagggtcagagagaggagatggactatgtatgattgatggagagattccattcctaccatcacttttatggcatacccctatgatctaatatgctttaattagactctgcctcttaaaggttctactatcttccaagagtaccacaaactggagagtaaggatttcctgcaagggcctaagggacattgaagatccaaagcaaaacagaagccaccacttccaacttcttcataataaggagccaaacaaattagtatcatcaattcttcttagattcatcagaacactgaggacaaactgatggtaaacaagatggaacagaacgtagaagaaccaatcaaaggatatgtagatctttgtggtggggatacacaagaaaaagggaacaagaagaatgtcaaataacaatggttgaaaacttcttaaaatgaataacagacatgagtccacaaatccaacaaactcaggggacaacacacatactaagtgcttatggtcatgtcatatccaaagcacagaaagtcaaataaaaatattgaaataagtaacaggaaaataaaacccttgcttaccagggaacagataaaaagtacattcagtttcttttcatttccattcaaataagaatagaagggaactgaataaatggtaaagaaaacaacaacctgcaattttgtatctaataaatttatccttcaaagtgaaggtaatttcttagacaaagaaaattgttactgggtgtggtggtgtagtcctttagtcataacagtcaggaggcaaagctaggaggatcactatgattttgaagctagcctggtctacacagtaagttccaggcaagccaaaactatatagatagactcaatctctaaaatttaaaaaaccaaaccaaaccaaaccaaaacagggaatatgtcatctatattttcttgcaagtgatgttatattcttctgtgggtatgacatggtccagaaacatgtcacataatgaaggacaacattgccaaaggaataaatgaagattttatttattcttaatcattcttacagaaaataatatgctcaaaataataatagttgctaagtattaattattatagcacatcaatcagagagatgagtatcaataaaattgataataaaacctgggaaatggccaggcattggtggtgcacacctttaattccagcactcgggaggcagaggcaggcggatttctgtaagttcgaggccagcctggtctccagagccagtgccaggataggctccaaagctacacagagaaattctgtcttgaaaaaccaaaaccaaaaccaaaccaaaaaaaaaaaaaaaaaaaaaaactgggaaatggccatgttgtcaatagatacttgcactgctcatgaaatagtgctattcaaaaatggacttgaattaaacctgaatgagtacagaaaatctctgatgcaattacgtacacacatgttttaaaacagcaaaattataattgataatgctagaagaaaagaaaaacacgacctcatcaaatgttcaatcaaaccctgcaatgtcagagaaagaatagataacaagaatggaagaaggatgagtaaaaaaaaatgccaaagaaatagctgtaagtaaagtggatgtaaatactgtagccagtacttagaaactgattgtgctaaaaagtgttgactctctgctgggtcccacaaagtaactaaaagtactaaaagcaggggaggggggaaggcagatgtttctgtcttcattttgggtctgtgtagaaatactttgggttagtgtctcctcagtctacacgtaggcatgccaatcattcaaggagtgtctgtccacaacccgagattatctaacccatctcctcctcctttgatgctaaaggcacaaagataagaggaattgaggaaaccctactgtcatgtcagtttttagagtgttctgttccaggcctcctaatgtgcctgaagggttccagtcatcatcctaatgccacagtttcctcagagtccaggaacagcagaactgtgtaggcatgacacatcatcatgagattgttcctcaagcaggaacaatcatctatcagaccaatcttcccttcaaccagttaggacatcttagagtcaacttgaaaaccattaactgagtagtggtaaatgaaaccacacactgaccatgactgcttagtctttctttatttcgccttacagttcataaccttgtcccacacatgaacttggacttgaggtttattaaacatattatctcttcttcttaatgtggtcatgttgattaaattttatctggttttgctatcattctttcctttgattggtatggtgtttggtatattggtatattgattggtgtatattgattgggtgacataccttttgccctaaagctccagaaacaatataactctgttgaaaattacttcagatatgaaaaaaactaaatacaccaggtaaaaagcaaatcttgttagtatgcattttaaaaaaataagatccaactatatatacgttgtttacaaaaagcctatcttaagcataaaaatacaggtatattaaaaatgataggtatgatgaaagatttatttaatacaaaaccaaccttctggaaaatataattattttgaataaaaaatcatacataatgataaaggcattggcatactaaaagatatagtaattcttagcaatgctctatatacaagattagcaatgttcccaacaacagaacgtgtgaatacatgaaataaaacctgacaaaaaatacaaggaaaggaccagtgaagtagctttgcttacagaatcccatcatacaagacacacaaactcaaattgaactctagaacccttgaatgaggaaaagtaaagccattacacaaagttggctgtttgtcctccacacacacaggccgtgacatgtgtacacacacacacacacacacacacacacacacacacacacacacacgcgcgcgcgcgtaataaaagaaaaagaaaactggaaaataatatagaaaaatgctggttctctgaaaagctaaggagaaaatgtaaacttcttattgggatagtcattatttaataacagcaaaatgcatgtattgctaacaccagaaatgaaagatatactgtattaacagaaaaaggcaatagaggaatattgtgaatgaccaagtgcccataactttaataacctagacaatatacaaaatatcatttccccttttttgtttattgaataaaactgggacatttattgcatcaacaatgccattagtaccaatgtgtcagacagtggcaactattaacattttttgccatagctgccagacgagataccaagtaggaaccattgctggagcctgtcacagtgtcccatgaagcccattatctttgacaaaatcaaccctctaagcaaacaagaagccaatgccctgtatacaaaaccaagaagccccacctatgtgtgaccttcaggctgaggagccaagagaattcagcagatgagttctgtcaagtgtggccctgaggctgggggcacaggaccaccttggaactaagacatgggctcctgcagcctctgccagagagcactttgcatggtgtccccatcctatttccattcatttggcttcttcttctgaaagggacacagccttccagttgataccacttttagtaaccggcatgtgcgtttatataagtaccttgtaaaacgctgagaggagaaaagaagcacacacagtgaaaatactggaaactgctcagtgtttagactcggctgtagttttctccagcacctctgaaaagccatggcttgtctattcctacacacacacacacacacacacacacacacacacacacacacactgcacacaacacacatccacagacacatatgtatttacttcactgctttcctgaaaagtctccttaagtgtagaaacatcaaaaatatattatctagaaatgccaaactacaaaagctactgtacagagaaacacaaccattagaactcccaggcacaaacacattgcgcatactgaaatactcgggtaagccagctgtttttttctttcaaatgacttcaatcagctgcttctctcagctctccagatagtagcagaatcataaatgtaagacttgacaagacacagacccagttggtgttacagcggccatcactgccctgcattaaccgcagctgcagacagacctcttgccacctcctgtccccaggatacatgaattcctgcagcagtagctacgctcatatcctcgaggcagtgccactcaggccagatccctaaaagtgtccacccactcttccgctctggtatccatatcacacctgccacctgcaactgtgtcacagggttcctctcaaactgttaggagttcagcttctgttcagctcatgcagcacaaacccttcagggtcttctgtctttgaaacagtgtcctctctaggaacactgcttaactactctgtgctgaaatacttagaatggaaatacacacttggattcccatctccagtgagtttggaaactatcctagatttcctccaatggaagcttttccatgggaacctcatctcggaaaagaatgaattcttcattatcgcaattacaaatgaccttgaatggcaagttagaaaacaagtgaagcttatcctgtaggtcttgggtaccaacgaggatttagtaatcaaagtgtcccctaaaatttgtactttgaaaaggaatggatagtaggtgggcacaagttgaagaagtgatcttgaagtttcagggctccattaggcatcagttgcaaagatggataagatggtgtaattattggggtgtggaaaaaacagagaggggatgaaagatgacgctaagctttgaatctgggtggcagaatggaatatgactacgtggtgagagaaaaacccaggatgtggaagactgcagggaaaatttgggagttcagcgtgggctctgttgagcttccaccattttcctcttgataggaaaacattcacactgctggcactgataacttgtataccattcaaatcacgatgccccggataggatatttcagtgcacacagaggtcaggaaatgctcacatgtcagaatgccagtcttccattcacaaggagaagctgaattttatataaattttgatcatcctttggatatatgagggtagaacaaggaactgatggttcaagaagctaaatcactgccttcaaataaaaccttctcaggccaggaaattggctctacaattgaaggcacctgcttccaagcctgatgaccggagtttagtcccagggagccatgggacagaagagaacagctgcatgtactggcctctacatgtgctacgtatgacgtgtatgtgtgcacatagatgcctgtgtgcacacacacataatcatacacatatgcattttcacacacaaataaacaaacacaattaaaaatatataaagtgtctactagagcaattttgcagaagttaggagtgtatattgttttgcagaggatctaattcctttctcagcacccaggtcaagcagctctccactacctctaactccagttctagggggctccaacaactctgacctatgagggcaactgcacccatgtgcacatacgctacactgatatagacaaaattaaaataaatgaatctagtaaaaagaaataaaatagagcctcctcagtcaaggttcctttccaagggttactgaattattccaagctctgtctctacagctttgctttctaatgtaactactcaggccattcaatgcattgctcgattgccatctgtttcctaccctggttgctcctggcatcggtgtatctgggtattcactttctcatagaaggggagggagaatggcttgggacttggagaagaacacactatgaggtaatgtactcatcccatgctccctcctttaagcaaactgatgctggaggagaaatttaaaaaaaaatggaaagaaaacctttcccaagttcttctcatatgccatgccttgacaggtattttccatatgtggtcattgaatctttatgcacttgtaaagtatgattgagtgatccagcagtagagattaaataatttattgtaaattacacaggacattgcttccaaaaccttgtgttgtctttgatttggcaatttgtttgcttactcccaaagttaacctcatagacaagggcatcattctgtttggtaaaacacttcattgttcttacttttgaaggctctgtctaggtagcctaggctggcactaaattcacaatattctcactctctttcgagtgggcttcagcttggattgtaacactgaccacgatttgttcagtctgacaaagcatttctttctggagacaaagtatcatgcagcccaggctggcctcaaacttgctctgaagctgaagatgactaaagttttaatcctcttaccattatccctcccaaaatcttcctccagtcttggggttatagacacacatcaccacaccctgttttggactggagatggacactagggcttcacaaatggtctggaccctcgttcccatctttaaaatacagacttgcatcttgattttcacaaccaatgagaaaagggtcatgatggggcttataagagaagggcttttctgtctctttataccattacttcttttagaaatgaaatcatgacttaatttctatgttgaatagaacctatgaattatccattgcaatcatgtgtctaatgtttgactgtggaggaagaaaagcaaagggaagtagaggcagggaatacagagaaactagagtaaattggaagtccagagtcacaaaataatcactgtttaaagtctgtacatatttgtatgagctttagtctacacaaatgtgtatgtgtgctgtgtgtatatacacaaacgtgatatttttcttacaaactttctctgcaaatctgctttcctttctgttcccaacatattgtgtaaatatgtcattatgcataaatctcctctgtaacagcttcgatgtggtctattatttagaaacagttgccaaacaaatagcatttcaaaagcaaaagaaagttaataaaaagtgtaaacatagcatctccagatatacatatggatatttctggtatatttgctctctggtgttcatccctgaaccccgcagctgattggttcaaaactagaccttatcacatggctcttccttccttccttccttccttccttccttccttccttcctttcttccttccttcccttccttcttttcttcctttccttcctttcttcccttccttcctctcttccttcccttctttctttctttcttcctttctttctttcttttttaagagatatggataagcctatatcatggtggcaaaacatgacagctggagcagaaagctgatggctcacattctccacaacaatcaggaagtagagaaatcaagagcaaccaggcagtggcacaataaatcaataaacacaccaaagtgaccttctagggctggagttggagctggtccctatgtgttctttagcttctcttttggtgcctccatgttcagactcatacctggcaatctgtgtgtattacactaaccatctccagtctgttccacagttctcactatttgctagaaagacctcccctagacccagcaggccagttccttgtgctggggatcattcctatggcatattggtctcttgagtggtgttcatggctaacagatggttgatatattggaagcagtctgaccctaatgaatgtctaattgagggtcacagatgaataaactatgcttccatggtgggatatagctgccagttaaaaaaaaaatgatttcattagcgtggttgtagaatcaccatagaattttctttttttctcaaactgtataacatttaattttttgaaaaatttccaaatttaatgaaaaattcatataacaattttcaagtggcagttaatacaaaagtgaacttagaaggaaatataatgtgatctacagatagcaggagttcagttaccctaaccctaaccctaaccctaaccctaaccctaaccctaaccccaccgactcactttataaataaatttttattttatcgaggaacagccaccgactcactttataaataaatttttattttatcgaggaacagcccctgccatgttcatccattcatttcagatagatgactaaatgcagcaagtaccctgtagacctcaaagcccagaatactggccttctggctcttttgacagcaggttttcctacctctcatataatgtgtgaaattaccaataaggagccaggtaaaaaatacaagggaatgtaatagggaaaaagccttacttacagagcgacctagccagccggcggggcagcagtaagtacagcaagccgaagatgaaagtgaaagagggggccatcacctgagaatccctcactcttaaaacttccctgcgacaccctgataggcacctgtagccagcccctaagcaggcatggctacagtttcccctacactcatatacttatcagcagtcatttatagtcatttggattgctgcatttcctagagaattcatttgttctgtacagacaatgacttagctcaacaaaatgcctctagtagttaagaattcttagaggagtctgtgttcagtgaggcagggatgctgggaggttctttactcctgcatcaacatggctcctagggggtccagaatgctctctccattactgacaccacaactacccttgagaagagtccctgcaaactgcccagcaagctctttctctgctaaccagaaaggaagagagaaattcagaaattcaagaaagcagacttttacaaatgtgggtggaggagaaatgccttcctggcacctcccccgcccttcctgtcttctgtccctccactgatcactggtgacacagactctggaggtgtaggaggggctggtggcgacatgagccttgagtgcctgcagatgtgggtgtgtgagctcagagggagactggactggagaaaggcctcgtgctcacaagagggagaatgagtctccggggacatagcacatctgtaggaaattacaaacttgaggtcatgtgtgtatttgagagtgagaaactcagcgtggaagagactccaacagcataagtgattttgtgtgtgtgtgtgtgtgtgtgtgtgtgtgtgtgtgtgtgtgtgtgtacacccatgatggtgagcatatgagagaaggaagtggatggatgtgtgtcacggagcagcaccatgtgtgtgactaagtgtggtgtgaactaacagagaaggacaataaatgaaatgacaaggaaggggaaatatggatgagtctgagattctttccagcaggagggatttgtatatagatgatgtcactctagggtaactaactgccttgcacgacaatccaatgccaccagtgagaaagttactcttagtccaagaaaacatgtctgggttgtaaaatgtagtgaaattggctgacaagagggttaaataaatcctgtgactttaatgagtaacaaatttaagtgacatagacagggaaaagccaattattgaggatgaaaataagcctctcacaaaatgtgagcattttttattactttgctcagagttctacttaatcttaacacacacacacacacacacacacacacacacacacacacacacacacacacacatatattcttttatatttatacacttacaatatattcttgaatgaccacttattttaccagtgtatttttcaaggagactagagtcccagtgccatgcattgtggttaaagttgattgtaaagttgccaagctcatggtaagagacctctggttatgtctgtgagggagttcaagaatggattaggtggggtgagaaaatgcgccctaaatgctgtgtcatccatcccagatggattaaaggggagaaaatgagctgaacataagaatttatctctctctgcctcttgactgtgggtgcaatgtgactggatgccccactttgctgcctccatgtctttccactgtatcagaccatagctgctgcctgctgaaaattgtgtttttcagagtttcttcatagtagtgagaaaagtaactaatataccaggtttaatatagtttctaatcactatgtttgttgattggatgaacataaatataaatgaaataggttacttgtagatggaaaattacaagccttgcctctaatctgaaagaaaatacaggcaatagaaaggatcacatctgttgtcacaacaaagagagacagtggtatttgaaatttgcagcaattgtttgaatgctttattgcaatgacaaatattagaatggactcacggtcaccagaacccatgttgtgaggaaggaccattcattcttccttggcatttgaatattagcatttgtgggaaaagtcagccgcacggtggagcatatgctgacacaaatacagcaagctgtcttctcccaggcacaccccaagtctaggtagcctgatactacttccacaaataagagacatgaagacttccattaaatcgaactgttctccaaacagaatgcacagaggctgaccacagggaaatttgtaacacagggatcatccttaggatcatctctgggtacaggctgagaggaacagctttcaaaacctctacaatctgtgactacacatcccagcctgcccatgatagtcccaaatcatgctttccatcttgacatgattataaaaggcacctgatttcataacaggaaacaaatcccagtgctgaccccctcagaaacatcacttgcttattcttcataagagaacttgtggcctgcggcagggaatcaactagccaagttggacatattccgtgggaccttaatttttgtgtatttcctaagtataaaaagtgtttctacctttttgcagaaagcacataaaagccttcatttcccccaccatttaattcttcagatacttcagcaaaacctgaatgaaacaaccccagagacaccacttagtgagcttttttcattcataaaagtatcacatgtatctatgaggaaaagtcttattagaccaccatattgacctggctcatataaaagccagatctcatcactgaggtcagtgcatggatgatgagtttcaacttgtgcttgttcttggaaaattccagcagggactctgcctgtcaccggcatgggaaacagggctgggtatgccggcttcaagatcaccattcatggcctggaaatggatgcacgtggtcacttaaaaaaatgacttgtatttaaaaaagtctttctttctttctttgctgtaattttgaccctaagacaacaaaattcaaatcttgagttaggtaaaggccccctaagcctgggcaatatcttggaccttcactgatccaaaagctacaggatcatttcatgaatccacaaatgttaatgacaacatgcatgtgatgtttaagttagaaggtaagtttattatacaatggaagatttctaagtttatgattctactgagaatatggataagtgggggcagagctcagttgtagagggcttgcctgccagtattctattaatataagaccctgagtttcttctttgttccttttacattttttttcacagaataaagctcaaatacacatttaaaactatctctgggtgatctttaaaattagtgggttttgttgctttcttctttgctgtcctgcctcctgagaatattcttccaccacacctcttctaacccatctatgtagatcctgtctatatgtcaagactgacttgtggaatattcctatatactgtgtgaatatatatcactgtgattggtttaataaagaagctgatgggcaaacagctgcacaagattgagttaggtgggagagccagactgaaaatcatgagaagatgaagagcagcatctggggagtcgccagcagatgcagagagaaacaagacgggcatgctgtacttagaaaaggtaccaagccgtgtgacaaagcatagataggaaataggtgttaatttaaaatgtaagagttagctagtaacaagcctgagctgttggctgagcatttataattgatataagcctcagtgtgccaacttgggacctgctggtgggacagaaacttctgcctcccttgacttcatactttatttcctcctggaaggcttttttagctcctcaagccagaaacaatctctccttattacactatgtccctcacatgacttattgtgcctttgctggtagtttggataaatgtgtctgactgtgtttaggttcactgacagctcttcatatctttgtagcattttccgcatagttctgcacaaggtaatattcaataaatacttattgaacgagtataggcataagtgggtggtttctcgagagataaatgaatctttattatatgaatatgaaagatgcactagaatggtttccccatcttctgggcatggtaccacatacctttaatcacagtgctcaggcaactgcttatttacagataagcagttatctgtaaatttgaagccagattggtcaacacacacagacataagctaaccagggatacaaagaaatgttagtgaaatattttgataacacaagcacatgcactgccatcctatttcaggcatgtgcacatacttgtacataaatacaattccctttctgagaaaaaaatgatgttgggaacataaaggacaaatgtgattttaaggaaactacagtctttccaaacaaaaatgtacaatgtcaaaaattactatgtcaaaatgttggtggtacacatataatttaagacatctagcagacagtaacaacaaatccataagcatgcaattaagataggtgaaatttcacctctgaaagtgaggataaacccaagaaggattttcctaagtctgtgcacatctgtttgagaattttaaaatgtatttcctttgagactcacactgtctttcatgtttgcggttcaagtatatacacatggctctaatacctcaggcaaaatatgagctaacaccattttggcatatacacaaggccatgattttaaaagcaattgccttgctttggtggtgaagatgaaattagagacacagacttggggcagagagatggcaaggcaatggcaactaatcaatagatagtttttaaaaaatctacacatggataagaatagaatgtagctggatttctcttccctaatgtgatttatttggaaggtgtgccatcacattttttcttaatccaagttcatggagatgttgacaatgtgttctctcagatctgcacaaaagagaaacgtctggcctttcctcagcccactgatgcttcccctttaaaataataataataaaaaaatccacacacattttgtaggagtgacacatcaaagcaaatgctgattcatccgactcattgatccattcttctagcaatcaccaagtgctcgtgacatgccagacatcatgatggatgggcagggaaattaacaaaaaatgaaatatggtattcactctcaaaagttgcttctagccggataggaaagaaacttcaatatggtgaagttataacaaaatccaaatatagaagtatagtgatgccagatgtactgcctattgacacattgttctcacctatcaccctatcaattgactcttgttccaactttaccagggtggtaactgaggcttggaggcattaatcatcttgctaaaaatcaaatagttaattctagtcctaggatttgagtatatcatggatttttcatgcattagcacatatgattttaagcatgggatcaaaggaagcacaaaacaaaggagtgattgggtgagctgcttagccataaactagataatggtaagaagaggaaatttgcttatgaaatcaaaggaggctgagctggggtggatgatgtgacagtctttccttccaggaatcacttggagtgtcatttgtataaatccagagcagtgttagtccttaggccaacataatcaggatttagaggcccattgtggttatgttctcaaagccccaaaggaaagatacagctacagctcacctccttatcctatcctgaaccatgcattgatgtagactcagttagctttccatcactgtagcacatgtgtgaggcagttcaatatataaaaagcgtggttttattttggctcatgggtttggaagtttcaggccaggacaggttgactactttgctttgggcctgtgtgaggcaatgcatcatggtgggagtggagtggagccaaaacattcatgtcatgaccagaaaatgaaagaagaggaagtaaggtcccataatctccatttgcacgacccaatgacacaagggtctctcactagcttctttcttggaaagttaacactacctctcaatattaccatgctggggatatttaatatctaagtacattgaaaactggagcaggctacttctgaaattcacttagataagagtatataggacatacacacagcctcgaattattgtctttataaagaaactattggaatagatctttaatgctctaaccctctttcatctggaacctttaaaataatcttttgttttatatatacttcagaagctcacttttcatttttaaaaatattaattttatgtgtatgagttttttgccatgcttctccttagatatatcatgtgtatggacagtgcccatctgtggaggtcagaagacctcctggaactggatttaaaatcccctggaactggatttaaaaacagctgtgaactatcatgtgagcactggaaactgaactcagattctctgaaagagcaacaagtgctcctaactactgaaccagctttccaactatggacactccttggaatagctagcaaggggaaatctccaaaaagagtttccatacctagaaagtaaaggaaaaggaaaagaggaaatccagaagaaaaataaaaaccacaggttttcataaaggtccatgcctccatttcagcatctgttggtttcaaaaattttactaaatttctgttcattttgtggatccacagctagcgaaactcaggaaagtcatttaacttttctgaatatcaatgaacatttgcagtaagatccaccttgccctgcttatgcttgaaagaaattgaaaaataaatgcatagtgacttgaagaaaattgttcataaatattaggtgtgttcatgttcatagctgctaaaagcagcatactgctaactcgaaatcccataggtcttcagtctacccaggccttgctgggtcctacagataagataggaaatgccaaaatcagagttttggttagacccactccttatctggaaaccccaaaaacaacctatttctgaaagtactggagaagctttgtcagaactggagtctttgtgattgttgtctgctattcttgtgtccttgttggatgtgaattggattcttgctgtccttcattccaccaagttgcccacattccttccccgctggctttctccatctgctaagtcatcagtggggcaaggagtcctgcaacactggtctgtaatctcactttggggggaggggtgtggagaggtggatctctggagcctgctggtcagccagcctacctcaaccagcaagcttcaggtccagtaagagatcctgtctcaaaacagtaaggcagagtgatgagataggaggaaatctgcatgcatgggctcacacaaccacacacacacacatatatacagcatgcatacaaaatttaaaaagtttaaagctcttacacatagctcctctatgtctctgcatcatggtcttcgacatcttctgtttctaaggagtttctttgtgaatatgcttgagaagtctttgttttaccattgctcaagaaaaacatttccagaccaacctaaaatgaactggaccgtttatacacagtaagcctttaaaaaaaaatcaaacaaacaaaaaatcaaaacaaaacaacaacaaaaacaatgatctgcagaaatgtcagaaaacatgggagatatgtaataaccaggcctgtcccttaacacctggcattctgaataactcatgttattcccaggaaatgaatggcttaagtacaagaagaaggcagaagatgcaaagctcattcctccagtttctggccatagttctagtcccttaagactgtatcaaagctaccttcattgcttgcttctcccctgaaccaaaaggctagtcagaaggcctgatggtaaactgtaaactctttcatttaacagattccagacttttgtcaccagattccacggggtaaagtataattttacatagcaattaggtatacatacataaacacccagttatcaacaggcacaaaacagacgtctcaacaattttcccttgttatgtgcacttgatatctgtccctggcttcttttcttttgtcctattttgttgtttcattaacttagaacatgtttgccatgaactgctaaattgatgccatgattcactaatgggttagggtgtggagttaggaactattagctctgggtctagagaatgaaaggaaaagaatgtcagtggtttcctctttaagctgaagaataagtggatagttgtaatttgaaatatatagttttcagagtttgaggcttagtagtaaattacaattgtagccctctgtgatggttggtctccactgtcatctcaactagatctagaacatcctaggggaggcatccctgggcatatgtgtaagggtatttccagagaggtttaattaaggagagcagagacactctgatttaatcagggaaaaggaagatgtccactgagcaccagtaatcatcactcttttcttcctgattgcagatgacacaatgcaacaggccaggatggaccataggcctcctaaaccacaagtcaaataaacccatcctccctaaagttagttgtctttgtcagaatcaagagaaaaataatatatacatccttatcaatcacctttccctatcttatcaaatttgtctacccatatagggtaagtgctgtcaaaatgatgaaagccaactggattgttttcttttgaggtatgtcggatttttaaatggaagcctggatatgtgaatgacaggtctaaggaatgttgaatggaaacctccaaaacacactaaatgtgcattgtcaggtcggtgcatgctcactcattgtattattccctgctttttaaaggggcttgagaaaggttttcacagtgtagcccaggctgccttacccttacagtcatcctttgccttcatcctccagggtaccagtactgcatcacatagcactttttattcttcatatgctagaatcttgtaggggaagctgtagccacgcctacttaggggctggctacaggtgtgcctgaccacacttgtgagggcgtgatcagagtgacttggtgtgactgtgtttgctctttcggtttctctttgcttcttgctgtacagactactgccatgccatctggctaggtcgctctgtaagtaaggctttttcctattaaatcccctaatatttctacctgacttcgtattggtaatttcccactattgaatctttcataataaaacatggtatgatggaaaggaaatatatcgggtattctataacagaaacaggagattcaaggagatatatgaaaaggaatcttatttgcaacgattccaggtggaaaacttaagacgaagtctccagttttgttctgtgtttttttttttttttttttttttttttggaagctaaatgcttatttctaagttgtaattcctacagtattttcaacttcctccaaaatgcataatactgctaacagctaaattgtgccaaggatgtatcatgtactacatactataacactagagtcatctgcattttctcatttctcctcacagctctcttaaatatttgttcaaagcaggactactacatagactgctcagctaaactgcccaaagttatacacccagtaaggacaaacagacccagggatcaaatttgagacttctggctttccttccagggtctgctgtcccagaatactaaggaaagacgtgacttactgcttgcctcacctggttctggggccgatgagctgttaagatgagttcattccagtgtcagttcaccctatcattaaggagcaggacagggatggctgtgtaatagctagctcctcgaggcttgacgatggagactccaggatgcagattacttgggggaatctgtcacgaatctgcaaggcaaagatactaatcatcctcgcgcacgtcaggccctagtgtataggctgcagcatagtagccacagggctgcccagttccagtccaaggttttacaagtagttgttggagaactgaagcaagtcaacagtagcatgctgtccttgtggggcagcccaccctttggtgtcatattgttttcaatccctactgtaaaactacctatgtgtcagccttcaggtatttcattcatcatcccaatgccagaatctgtaataaacattagacaggtgtatagaaagaggtattgtggctctgaatggtgtaaggaagggtatggaggagtgggggagtcattctgtcccagcagatgaggtcactgcagtgccatgtggttatagctgtttagtgtgcttcaaagtttgtctctagaaaaaaataattttgggatataaatgatcattattgaatgaattgtttctatcatcacctcaaattgaccttcaggatttctttgctagtttgcttcttattgttgtgataaaacaccatgactcaacgaaagggttcatttggctacatttccatgtcacagtccatcactgaaggaagtcagggcaggaacttgaaggcagctatcaatctgatggagaaaatgtttggggttccttttttgccaggtgactccaatttgtatcaatctgatagactaaccagcaaaatctcttaacacgactgcattgagagccttcatttttaaagaggtttaattaaagggctgggatagagctcagtgacaaagcatttgcccagcaagcacaaggtcctaggtcaatttccataccccgaaacaattcagcatcatatagtcccacaccagttcccagtactgcaaggaataaaggggcagaagaccttacattaccagctccaaggaaattagaatcctagagaatttttatctgtgatttctttgtgttatataacctgtggaggtcatgtttcccttctaacccttgaatatttaattggcttggcttggctactgtcgttgcttggatatgtgtgtgtctgtcctggtgtttcatgtgatggagacttaaactccagtgtgataatgttgaaaagagcctttaaagggggctctgagtaagaaagttaggtagctcctgttgggaatgcagccctggagagggactaaaggacatccctgggctccctgggacagttctctccaaggagaattgtcaaagagccactgtggccatgttctacactttgttttctatctatatgtgagccatgatgcttgaactttcaccttctaaaagttggagctaaataaacttcctttccccctaagttacctggccttggatattttattataaatgaaactggactgttgcgttgacccctcccccatacattgcctccttggttctcatcttctccctgggcttcatctataaccttaaatacttttcaactatcaatcccaaagcccagatgctttgtaacctttagtgccttatctataacgtacagaactaactaatctaagcaagtctgtacctttccccactccaacttaagcttctcaccagtacttctgctacttacatcccataatgcccagaatgatcatccatggccactatatgcattcaaagtgcttagggccccagccatctaattttatttcttttatccaaaacacaagacacgtaccttttatttctccccacattccatcccattgatataacttaggcttttaataacttttcctaatctaatgtgttgtccttcttttataatttcttttttcattcactgaacatgtgttaatggcatacacaccatatataaaacagcagaaaacgaaaaatggaacatataaggtcatagcttaaaatagttgaaattgcagcatgcaagcagatgatgcatctttgcgatttttccatgcataagagtatgaatagctacaacatgaagtcagttggtagaagaggatgtgagcaagcagccatgggacacactacaaagcagtaaccaactcaacgctgggtgacagaaagggattaacagaggaaatgataggaatggtcttgttgaatgaagagtcttcaacaaagggcaaattggaagaggacatgcctaggctgggggaagaggatggagaatgggcagaggcctgactgaaaggagggcaagtagtctggaggaacaggggaaggggtgaaaagggacagaacagatgcctatgagtgctcaggatgtcacaaaaagatagaaaaatacattaggtcatactgagaagagtcttgactacaatattacagaaatgaatatctattccataggcaatgacatagtccttcagtgttttaagccatagccacgttaacatttcttttttaaaaagaaatgtcatgtcagacaatggtcccctgaaaagcccaaagcaatagctttattcctagattccaaggattttgaacagtgtcatgagcaccaacagttaagtataaatttaagctgtgtgtgtaactgtgagcattgttttctaattagggaatctaagcttggaactgttcaataaagataaaatgtgagccacatatgtaatctttaacttccttgtcatcacttacaaagtgaaaggaagacaagggagacagctcagtgtgtaagtgtgcaagaatgaggatttgagttcatctaaaatctccagaacccacataaaaggtcaggcatcctcatgagtgtacctgtaacctcaatgctgggggacaggggcaggaggattggtagtacttgttggctacaaatctagctccatatttaatgaaagaccttgtttcaagggtgtaaaagtaagcatgatagagctgttcacttgatatccctcattctcctctggcttattacacacacacacgcacacacacatacacacacacacacacacacacacacacacacacacacacgtgcgcaggaagagagcgcatgtaaaatgacagatgaaaataatattaataacatttcagtgatttgtttaatcaaatacattcaaggcattctcattttaacatcatgtaaaaaattaatgagggtcaacaatatggctcagtgggtaaggacacttgctggtgcctcgtctgacaacctgagtttgattcctaggatccgcacagtagaaggagagaactgacttctaaaagctgtcctctgacctctatgtgagtatgtacacacacacacacacacacacacacacacacacacacacacacacacagagagagagagagagagagagagagagagagagagaaactaaataaatacaataaaaacttttaaattaacaatgacttgttttatgctttgttttcttgtgaaatcagttgagcatttcataccgatagctctgggactacatgatctgccaaagaattaacatggtctgccaaaggattaaaaactactagtcaagtgtgatggtatgtgcttgttatccctgcaccttggtgtgcctgaggcaggagaatcacaagttcaaagctaacttgggctgtgttgcaaattccaggtcaacctctgctacagagcaagaccgtgtgtcaagagaaaaacaaaacagaagaaaattaagaactgagttaatgaagtagctgaaagaaatcattttaaaagtacataaggagatctgaaatgcagtgatggtttgttgagcttttgagaagagatcaaaagacttgatttaatccatagcaaccaccccacccaaaggccaaaatgactcaagagcatctaaatagggattggtcatcagttgtagcagaagacaaactggggatgccgggggggggggggggacccggttgggtaagatgccttgaggatttccagactgggtaagggagctgttgaagctgctacttcctcggctatcacaaatgcaccggcagccttgtctgaattgtcttccagtgaccaagtgcgatgctgttgttcacacccttgacctttggtcctcacctttgttctccctgcctgatgctgcctgtcaactcctctccctctgaggctggatagaaagacagggcaagttaaggggagaaaaaaagaggcagctccttcctgaataacaactcctccctgtcttccagattctcttcaagtgatggccctctgatctacaagctcagaactctcatattccacttacaccagacaagttgagactggtgctccctggtgggtagaatctgtgtccctgtaaagcctgaagaaatgaaatgtgtgttcaacccttaagatgaagggatataattgtcagagtgtgcattagagcaggatgatcttggcctgtttgtgggacccctggcagtgggaccaggatttatccctgatatgtgaactgggattttgttacctattccctatggtaggatactttgtgaagtcttgatgcaggggatgggggggggtggcttggtcctgcttctactttgttgattccccatgggaggccttacctaccctctctaaggactggatggtaggtggggaaagcagaaggagtgagtttagggggaactgtggttggtaggtaaaatggaccaaaaaggaaagacaggagaattatggaaattcagatgcatgtcagtaaaacacccatacacataaaataataagataattaaatgagaattccagaacaattgccagcatttctgtcaaggtttatcaatatagggatgatacttcttttacatatagatatttcatgttaaagtagcagtgaactggctaaaggcctgaatgcataacaccttgtgctagactcgttcatttgctcaggcttttgctgagaatctcaacactgttcacttatattgaaggcgactcaccttcccacatccctgtgtcccacagcataactgtatgaatgtcactctcgcaggtaccacaggaagctcatgttctcattttgatttcttagcaagccttgaaaagaatagccaccaaacccaccaatgtgtcatgtatgacttgctatgaagacaatgacacaccactctcccctaaagaagcccactccatgtgtcctttctttctgacagtattcatgctcatagccatcattttttaattaaagtgtattgtgtgagtcccttttgcccacatctgtgcaccacatgcatgcctggtgccttttgaggccatttggtcccctagaactgaagttacagatagttgtaaaccttcatgtaggtgctagaaacaggacccaggtcctctggaaaagcaaccagtgctcttaacaagcttccttgtcctggaaatctgcaggaaactctttataactccagctctgcttcctacttgcttttcctgaaattcttttctgaagccaagaatttggagtttggttaagtgtaagtgtcttaagaaaatgttttggtctgctgtgaatgacatcatggaactgtgtcctccccccccacacacacactgccaccaccacagatcattccaggtgttggcaccctgctagtgaatttcacagtttccaactgagagactttgttcacttactttccttacttgtcttcctgttcccatgttaccagtgtgaccctaatgaggctgccatagccaccttgcctacagcacagacttcacatatgtagacatcagtaagtcttacacatggcttgctttcctgaatacactgaggactaaaagcaggtcccttccatcctcagggatttagctccagtagcaaactgaggcatctgcccaggaaaagaggacctgttcttaggaccctgaacaattcctcaactcattgtttccctcgggtcggcttgtttctttccagctctgagaacttttccccctctcaacaggaaaacgaatgttcttacattttctttcatacatctttcaaaccatgtgtgtggctagtgtcactgcaagtcagtaaatctggggactgtcccagatttacagctttatgcctgttgccctacaagataattaagtgtgactcgtttcaaaatcaaaagcattttgtttctgaagataaatgttttcaagactggaaggctgagcaatgaatgtcttcaacaacattgagtcttcctcacagccaccatcacagcttcacctaaagctcatgtaaaatgaatagttcagtggtggagcacttgcctaccttggtgatgttctggggttaacccttagcacaagagagacgaagcatgatagggggaaggagtgagagactgacaaatttaaatgctcaaaataccctcttatccttgggagaatcttcttcttaaaattaatgtgtccacatgtactagctgataccttatcctaatagctaagcagtgaaataatcaaagctgtttactaataccaatattagtgtgaaagtcaccataggcagcaggattagagccaagattttgtcagttaaagattcattaaagtggggaaaatggggagatgcatgatatgaaccctacacatacatatctacatatacaaaaatggggtgtgtgtgtgtgtgtgtgtgtgtgtgtgtgtgtgtgtgtgtatagaacaggaactcttttttttttttttaacacagtagagattctcccgggtttggtatggagatgcactgagatgaattccaggtgaaatattctaaagccccttacatctgtggactctggatgggtcgtctctgtgtgtagcagattagataagatataaactcataacttaggaagataatcctattgtctatctctaccttgcaaatattacatatttcgaactgtctgtctcagggagatgtagggtgtgactggtcccatctacagggggaacatctgtgatttaacatatatatacacagatatatatatatatatatatatatatatatatgtgtgtgtgtgtgtgtgtgtgtgttttatatataataatctacatgtattccaatatgtctacaaattctcacacttatcagtcgtgaaatattcactatccctttatgtaatattacaattttatttaaattatactagatttactcaatattacttctaatttactttgtaagttacttttattggcaaagtattgactttcacaagttaaataataagtagaagacaaagcaaaaatggacttcatcgttaaatggaaaatgagttttaaatttgtaaaacagaaaaaatattcacccagggaccacatgcactttaaaaatctaaatgctgtatttccagacaagcacatgtaaatttatagggaagtggtatactggaaaacattcataataaaactggcaaagagttaatgttagaatgtacaaagctactggatgcatttaggacaaacaggtgagagtgagacactgtgggggtgggggctcttttcagaaccctccactcaggggaagccaaatccttgacttacccaccaaaaagaatttcaggaaaagctacagtgaagcagaactggggtttatgaagatgaatttttaacatagatcttaagtagtggtgccaataggaagagaggcactcagggaaagaataagatcgtgcatatgtgactttgggaagttctgaagttgctatccgaatgagctcacaggccggatcctgagaggcacagagcaggattacaagtgacagggtagaattctacgacacaagagttaaaaacgcttgggatattttctgtgtaaataatggttgagattttcagaaaaaaagatcttgaagattgagaccatactcaaggtcacatacaccctgttcttattagtgctttgttgctattttaatatccttgtttgaaaatttgttgtctatgcatgtatgtattttgtgtatgcatgtgcatatgcatttttgattatgtctaggtgcacattggtgtgtaagtacatgtgtgtacatgagtgggattatgagtgtggaggcttgaagttgacaccaggtaacttcctcaatcactttacacctatacactgagtctgaatctcttgctaaacccatttcaatgagtctgcctggccaccttgctgtagagtctgcctttggtacctgggattacaggtaggcctccatgaccatgaaacatcctatatggactctgagatccaaactctggcgctcatgcttgattgataagtatttttcccacttatacactctctagctccttatttaagaacattttggtatgaaacaaacattatcttcatgctgacaatctctatagcaagtgttgttaattgtctggaattctggattggcagacagtgaaaggcttgaaccagactgtggagtgaagggctcttttccctcccattccattttatttcttctctttttatgtactacttcactcagaccttgaaagttaaaagagtagtatatactaacaggtcacagcacagcaagcccaagtggctacaactgtttccttggataagatacatcaacagtgccaatgaaaacatttcacttgggatatctcatccagggctggctgcccttggagtgtgagtacacatttgaccttcaatgtctgtgtttcaatcgtttccaagtggcaagaatgggtaataggaggtaactatgaataaattcaatgataaatgtatcagtggctctttaacacacacacacacacacacacacacacactcgcacacgcacacgcacacactcacacacacacacacacacactcgcacacgcacacactcacacacacacacacacatacacacacacacacacacacacacacacgcgcgcgcgcgcacacgcgcgcgcgcgcgcacatgcgcacgcgcgctcattgtcaactcatactcatgaaatacagaagaaataggaaaaaacaaataagcacacatcaaatccaatttggaggaagaaaccatcattcgatggatgccagtgataaaaagaaatggtcaatcttggcttgcaaaggcaatgtgtggagatcagtgctcaggcacttgaacttgtatatggagagcctgagggcgtttggttccacataccttcctcagtattatcatggttttgaaaacccactcaagtgccaagtttgtggaaggctgaccagtagaaaaaataagggttaaagtcaattatttcttcatgtaactaaggttttatgaataatttggttatatgctgtttctgttttcaagccttgtgctggctatttagagggatttacatcactgaaaacccccaagttcccctgtggcacacatgtcactggccacatgctgagatgcttctaagaagtttctgttacctaacagctgaagtcatgacagtatgacaaaccacacttcagtttgtacctgctatctttatggtgcatgtctagtttgcttttaattattgaacataaacatggcaaagatcagaataagggcaaaatttacaaacttgggctgtttctaaaaacttccatttttactgccgtatcaccattctgtttttaaatattcttttctcttcagtaaaataattaagattaaaatccataaattattattgttgcttacaaaaatttctgatggaaagacaaatgaaactttctgtagaaataaaacaagggtctggaagatatctgaaattcttcttctagatcgagaaaatcgtgcctgtcattcaaggttgcagaggaggggattgagacatacagtgtgatttatttgaatacatcgagatttcacactatactaggctttgtctctaggcctattcaaggcaatattgactacaagtaaaaaagtaaaaaaggtaacaataaataaaagaaaatattactaataagcaaataacttaaagattcactgatacacgaaattccatattgattatgtgacttatactactaatatcaacatgacaagaggtattatttaaaaattgaatattcaaaaatccagagccaacagttgagactcatctctaaaaacatccagaatataccatttttatggtgattcactttgttttttcgtaattgcaaatctctggctataacttgagcatctaacaaaaggggtggttaaatatgtccataattggggatattatgtgggacaactaaattatttataattacctcatttgaactttattaaaatgtttaaacataccatgaaataggaggcaatatgtaaatttaatacacagagcaaactcaagtacaaaaggaacaaaatataaactagtattaaaaattaacagattatgacttttaaattcaatttggctacataatttgagtaagcacttcaaccaagcaatccacaagcaaagtggaaacctatcattgcagtataaaagcatccaaatgtcagccaactccaagcagccatgcaaattactccatgccagcacagccaactgatcagaccatgtccaaataaggcaaagccttggatgtaaccaatcagatcatttctaccttttccttccaccacatttcgtaaacactcttgtccatgtgtcagagcagagcttcccacaccacttctgtctctcttgagatcaagcgcacacacagtaattctgtctaaagttcttttaaatgtgactgtaattctttcaattgcacatctctatttcacaaaatggtacacagtgaggatgtgttatacgtattacttcacaaatggaaagatatttattacaaaataataggcatgaactatggagtcgaacttggaattcatgtgctacttcttaatttcctgagtcactgagattattagctaatcatggttgctaacttgacacacctggaaagagggaaccttacttgaggaattgcctctggcctttgaaacatgtttggaggcattttattgattggtaaataatgggggagggcctagaccactactgggcaggtggtcctcggttgtgtaagaaaggcagccaagtagaatcaagagaacaatgtaacaaggctcctctatggcctcagcttcagttcctgccttgaggtacctgccttagcttcctaggctggcctctggattacactggagtgcgcgcgcacgagcacacacacacacacacacacacacacacacacacacacacacacacacacacacgcgcgtgcgcgcgcgcgcgcagtgaaacaaaagaggctttcacaaacttgctcattgaaagtcatatgtgctaccagatcaacaagattccagccctttctccatcaagaggtgataggaaggtatcattcataattcataattcttaaaaggaatgagttttgaatggacatgagtcagaaagggacaaaaactaaaaactgatagttttttttttttttctgttcaatcaaggattagaaaagaaaaaatgctgtgctgggcatttgacataaagattgtgacaatgaggatgcccatggaattttgtggtgatatattatttatgattgattgaagcttgcctgagggtacagaaagcaaagacagccacaagccatagagccaggcaataatgatacacacctttagttccagcaaccatactagctagccatagagccaggtggtggtggcacacaccttcagtgccaggactcaagagacaagcaggtggatctctgttacttcaaaggccacactgagatacaggagattgattcggtactaaagagaaacagctcccacaatgtaatctcagcactggggaatcacacacctttaatcccaggatttgagagatataaaaggaaagggcagcagtctggaattgcagtctaaggcttggtggagacaagattgtagtctgaggtttggtggagagatttctctccagtcacgctgaggacaggacagccctttcagtctgaggtagaggaaagagctagtggctggctgttttgcttctctgatcttcagcttcatgcttgaaccccaatatcaatctctgggtttttattaatttgtgttacagaattgaaagtcatacccacatagaatgtttttgaaactgcttatataaactgcaaatgaaattagctctcagctgtgaaagaaacttactaccagctactcagagttgttacacctaaaaatagccatcttctaatgctcccttaaaatgcaatattctcatagaacaagtttagaggaaagaaaatctcatgataataagacctgttgctgatagttctttgctatgactattgcaaccctgcctttattaggtagcagctgccagaactgttctttgcaaacttacctccttcccatggttctgctctgtggacaagttgattccttttgtggtaatatgttttctctctcttcaacatcatctaagaaatactatgtcaatggcaaacaaggtatagacatagcaagtgggttttgaattgtttatggttcaaagataacagtgtgggattggatatgaatagtccttggagccaaagagctatggtgatgatagaagttatcagattctttggattgatatatgtttccccaaaacatatgctgtggtggtttgaataggaatagccccataggctcatagagagtggcaccattaggatgtgtggctctgttggaatattggagcaaatataatcactggggtggactttgaggtttcaaatgctcaagccaggtgcagtgtctcagtctcttcttgctgcctgctcatccagatgtagaaccttcagctactctccagcacaatgtctgcctgtgtgctgccatgcttcctgccatgatgataaatgaactaaacctctgaacctgtaagccagccccaattaaatgttttcttttagaagagttgtcatggccatagtgtctcttcacatcaacagaaaccagaactaggagatatgtcaaagcccttgcctctggttactgtgggtatgaacctttggggaagataaagccaaattaagatgaggatatattgatggaccttataatcaaaaccactgagacatagaccaaggtgctgaagcagcaaccaaggaacactgaggactgacagtcaccacctgacatcagcaagagcctgtacagcaagtattcctgtaacgttaaaaaaataaagaaccagagactgatattagggttcaagatgacggtcagagaagcaaaggagccacccactagctctcacctctacctcagattgaaagggctgatcctatctccacaagctcttctccaagcctcagactgctgcctctcctcaacatgactggagactaatctcagaatgcagcctgagacactggactcctgtcttatattcctctctagggctgggattaaaggcatgagctctattaatcttttagactgattcactcttcagctgccctgggtggccttgaactcacagagatctaccccgagtcctgggattaaaggtgtgtgccaccactgcctagcttctacagttaattagtgcgtctatagctgactagaactttgcattctgataatttcaggcaatctttattaagtcataatacatcaccacacgttcccctaaaattttaaagtaagtgtggttgtgccaatgctttgattgcaggttaagcctccagaactcagagaagaaacaagttttctgtttgaagccacatggtttgtggtattcagttatggaggtgctaagagactcccacactggagaaagaaagatggaagagaaattgcctttggtgtggatttattaccttctgaagatgatgaatactaatgccaggtttttttaataaatactattttaaaatgaaataattccaactgcatacaaatcaatgatgagctcattcgagaaaccattaaagcctggaatacacgtaagaaaatatattcagcaggaccttgctctgtaagcaggatgttttcttctggtcaaaaatgaaactgagcagtgtgatcgttcggtgtcacagacaatcaagagtgtttgtaaggcttaagtcttacaaaagctaactctgccttataccctctaaaagtgcctgatggtaaatgcatgtatacacataccaatacatataatttaaagattctggttggtattatgaaatcaagtaataggctaactttagaacccaccacaaggacatggtgtctctccttgtgtgctttgtttatgcacgcaaggtctcattctgctgcctgagttagagatcagtgttccctatcaatttagttcactttattaaaccctaatatgctgacacttgggtacagaagtttaatcaataatttctcttgatgagacacatgcacttcattaatattcatgagtttctgaaaccatgcgactgaaggatggaatcttattgttacccaatccctgcagacctatgactctgtgaccctgtctgcgtaactactcctgatgagagtcttcctgcaaaggcaccagctgtggaggaggctcccggtcttgcttttctaatgggacagtcctgcaatccttatggggccaagcttgctctgaggctggccagctgtccccctgtcacagatcctgctgctttcggaagtttgtgcaaggcagcctaggatgcacattactataaaacccctgtcaatgttccaaaccaacttttgttcccttccaaatatatcaggaatgtttgcttgaggccattccagagggcggcagttgtactggagagatcagaagcagcagcatggattgtttgatttcagttctgggcctgagctggaggtggatgacttgacctacttggtaaataagctggatcagagttttaaaaaacaattcacttggccaaaaaaatggctcagtgggttaaggtactttctgctcaggctgatgaccagagttctactcctggtactcccatggtaagagagaacaaattcccacaggttttcctctgattcctcccacacacacatacacattctcacaatacacagacaacatacacacactagaaaaattaatgtaacagaaataataatattgtatattgccattgttagcacacacttaactgaaaattaagtcttactttaaaaacacaaattattaacacacacacacacacacacacacacacacacacacacacacacacacacacacacacatacacacacacacacacacaggagaattctcccacgaaggcccaactgtgggggaggctcttggcctttcttttctgacattgtatatccccatttttagtagccattgactgaaaattaacagttcctactgtttaaaaaacacaaaatcactataacacactcacaatgtcagccctcccactttcttagaaagtgctttgagagacaatcgatgcgttttctgaggcattgaaccacatgtctattcaataaaatgtgtttcatggtggagaggaatagcgttaattactacaacagtgttattttttcattcatctaacgaagacctgttttcatatctactaccaaaagcaatgctaaataatattctggccccatttgaaacatcatggaggttaactggcaattctactttacaaagaaggaagctctggctcagacaggtaaagaggtaaccatgtattgcaggtttggacccgggccagttgactctgcagctctgttttaatcatatagctagtgtgtgtctcattgttatagcaaccatgtttcctggggagctgacaagaaaagaggagcacacagataatgccaggtgtgaataaaggacaaagaacattttctgtaaggagtaatacagagaggaaggtgtgtctcaccactgtaaacacagaaaggaggaaaggaaggcagttctaggctataacgggaaagagtgatacaaattttcaagttgaaagttacattgagaaaaagaaggaggtatccacagaaaaatgtggaagtgtaaaaatacacaagactaagtgtaccattgctcagaattctgttcctatattatggttagatgttatgcaagatcagtatggaacagccatgaggaagaagtgggtaccaggagcctccgtctgctattgtagcagggattgtcattttgaagacgccaactgaagaagcaaatgggcgaagcaaaacatagccggaggactcaaacaattggatatctgctgatagaaacgttctctggtttatgttgtgcgttagtcaagaaatgaccaacagtctctgtggcttgtggcagcaggttgtagcacttatattctttacatgtcagccgctggaggactgtggctctacttcatgctgttctcattcagagacccaaagacctggctagttgtcttagaaggaaaaagggggaatgtactgggccatgggagggctcttaaagccttcttttggaagtacacatgtaaaatttggacttattctcatggtcagagtaagtccaattgccagggttagccaagggagtaggtaagagacagtcagttctctcgatcaaccatcaataaatatttatgctaaacaaattttttttactagataaaatgtactggaacctatttcttacaattatatttcttggcagtctgcgatctacataaggaagttatcattctactaataaactactaaccaatgagttgattaaggtattcagcgatcctgcgctgacagcctcctaaggaccaaacatagtgagtgacaggaatgggtgagacacaggttcttcccaaggtaaggtagacacttgccattttgatgtgttgcctttactgtattttttaaacttaaatagtcatgttaaactctagtaagaaagattttggaataatttttacttatttctaaaaatacgtcaggatgtaatcctaggagtgctagaaaccatccagggaacatacattctccacatctaaatgatgactagtcaagtctccgatttactgcgcatgaagggcctgtcctatcaagcttggaatttatcccttattatttcctccacaacaggttcaggataaaccatttaaagcaaaatttaagttaatcctcttataaaactctaactaacagaagtttttatcccattttatatgtatgataagtgatacccatgaataaacgtagatgtccaaacactaagtgattcaagacttcattcagtgacatcaaaatccccacaatgagctactgtgtgttctccatcatctaaatcttagccacaggcttctcctataatgttagacatgggatattttccttgctttgtgtccttcccaaataggagaaatccatgaagctcctctctgtccacccaaagacatagtacatgaatatacacaaaaatttgaaaaccggaacaactggattcatcttgtcttgcttatatgcttatcctaccatatccataaccagggtatgctctttccactgactttctttagtatttgagattattatattgctatcacttccaaattatagagatagatgacacatggatacatgatagagataaatgatatagatagatagatagatagatagatagatagatagatgatagatagatagatgataaataggcctaatttaatctcttccaaagaagaaatctaggtaacatacaacaccatgaagattggatttctttcctagcctggtatcagtaatggtacacacagattcataaaataatctctatccatctgtgaaaatgcacatatctgccttcttatctgggctggcaggtctgagagggagctatgggaataacaggtaccataagagtaccatcttgtcattcattctggtaaatttacattatagcttgaatttgaagtgtccaccacaggttcatgttttgaatgtttggtccccagttagtggcacatttttttttaatgttctagaaactttggaatgtgaggcctgtctaggggacatccggactttgcaggtcccaggctctccccttgctctctgcctcctgatctatcacaatgtgatctgcctggcctatgaactggagccactgtgatcttagctactctgccatggtggactgaaatccttcgaaatttgagctgtcttttctctctcaattcaattttatattcctatttacatcagaaattgagggtacaacaatacaaaagtgccacttcagattttatttcatttcttgattaattctttgagaagttcataaatgtattttggtcatattcaccctccaaatcttccatgaattcttctcacacccgctgtcccctatattccccctgtctttttctttcttctttttagtaactcattgactctaatctgtattgctcatatactcccgaggatgggataaatcaccagagagtagccaatctgccaagaaacatactttaaaataaaaccgtctctccctccctcctccagaagccgccaactccccgtagatccttgggtaggtgtgaggactcatgatcatcttcccacttcttgctggaccgttggtggtttgattctgtgcgggtcttgtcaaccataactcccatgagctaacaatcaaaatagttctgtcatgtccagaagacaatgttttgctcagcatcccctacccctacctccagatcttacaatctttctgcctcttcttctgtaagagtttctaagccttgaggaggggatctgatacagatgtgctgttctgcctgagctccattaacatttactctctgtgctttgaccagttgggactgtattaaccatcatttgcttaacaaagatacatttctaatggggtctgagagctgcaatgatctatgggtggaggtatatgaatttagagggtggtttgattctgctaagtggacatggttttcaaattttattttatttatattgcatgaacttactatttacacaataacagcacatttaggcccaaggtggctttctgctctaatttcaaccacttcatctcttcctctccatgtctctgagccaagagtacaatacaaagactttgatgacatctaataaacatgggctaatgagtcagaagaacccacggccacctgctccctgagtcttaagggaaaatatggggcttcagttgaatatgtggtcattttctttcctattaatttcccaagctcatctgtgggctgtgctctctgctctgctggggtgacacagacttgacagatggtactctcatgaccaagtagcttatttggaaacacagtaagggctataatttttcctataaaagtcttataaattatttgtatacatttgggcaggaatagtgtgccatgagtgataaattctattctatagaaatattagttggaaaataatatttgtataatatatgtgtgtatatgctcttatcacgtgtgtgtgtgtgtgtgtgtgtgtgtgtgtcagtgaatcctacgtatttcatttagagacttgggtctaaatagaacatcaacaaaaattttgatggcattctataagataaagatttttatctgatggaagaataagcacttattaaccagtaaattaaagatttcaaagctatgtcaaaagcattttaacaacttgggccttaagcacctatgataatctaaggaaagtatctatagctataaaaggagtaggccaccatttatggatccatcaacaaatgtacagatgaaaagaaagccgtttagattagcaaggagatagaaaggggtgaatattagcattaagaaagcatccagtctataactgagcaggagcaggcaagctctgaaagtgaaggcctaacgctggcaatgcaaagtccatctccagcttcctgatcatgtgagacttttctatcttggtatagcagagcatgaatcaaacctttttatatcttgttacaaattgtatacataaataatattatatatctatattcctcaaagaacatacaaatatgcccaaaaaggacaataatcataaataccccattagtacatttacttagatcataagttgtagactttttagatttaatgatatgtcatgaaaatcattcaatgatattgtatactccttagtaatatttaagtccagatattttcagattgaaataaaccttaggccaccttgtatgactttctagtaacactttcacaatctctttagttgactgtgaatcctttcttgagcagtcagtgacttacatcaaaatctccaattccctcagagggagccctttcagcttctggaaatattaaaagtaagaagccaatccatagtctgaatttgtctgccctgtttttgttggtttgttggtttgtttttctccctagaagaactcaaggtttggaatccatttaagatttcccccatcttttcataccattgacatgaccaggtcaggttcaaataatggtcacctgtaatccacataaagcccttaaagattcaaaaacatcgatcaatggactaggggtgtgggccagtgggaacagtgcttgctctgcaagcatgacaacctaaatttgatctccagaacccctataaaaatgcagatgaagtggtgcatgcttgtaattatcccagtgcccagaactggcagagacagtgggagccctgggtctcaccggcctcatctgctgggtgagatccagaccccaatgtgcatgtgtgtgcagacacatgcacacacacacacacacacacacacacacacacacacacacactcataaacacacatatgtacactcacacacctctgcaaccagagacacttcaacatacacatgcacaaacatacacacacactcacaaagaaaatgcagatgaaaatgacaatacctttcaagcattacatggattctaaatgtcttccctccatttttagtaattgaaagcatgttattgccttgccacaagttctatgtctaagacaggacctccaatgctctgaagcatcccttgtaaattgtagtatgcataatcactttcttatcagcaactctcttggatacaagccgagttgtgaatgcctcctattttaaaaacataaatagcatacggaattaaagagggtgacaactaagtagagaagaaaataaaataggagtgcttggccattaatctgcacggcagcctgctcattactgctcccaccaagatccgagagttttagttttgctcatgttcatgacatttacaacaaataaggctcaatgaactgtagcatatgggggctatcttgggaaaaaactgtcttttaaagtagtaaatgatcagaagagtaaagaatatatactgatttatttttcactaattgcataactgattaggcacaagcagtgctccttaaatcatttagttttgctcttcgttaactggaagaaagggaaatttgaattattacttgaaacgatacttcagattaatctgtgcttttcttttccttccttgcttccttctgtcctcctttctcactcactccctctcttcttcccttcctcttttttttttaattttttttttgttgttgggacagagagtagcaaggttttgatatgtagcccaggcaggcctgggactcaaggtcttcctgctttggccttccaaattctaagcatataggcaagttatctgtgccttcccattattcatgactccactgacactgtccctgtagtgatatggaaagctacaatgagccttgaatgtaaaaagcaaaataaaaagacttgtttgattggttattattattgttgctgttttgtcattgcttgagggtgacctctgtttgtatgcatcctgaaaggcagctctaaaacaagggattgataaatggctttttatatatgactagtcctgaaataatgtgtaggatctttatcaggttagatgttgagcccctgttgctagctcttctgggcaaatgtaggcagtggccagaatgggctgcattaacccttcggcttcctttggcttgcatagttagttagtatgggaagagataacagaagagaggctggtcacctcatcttccagctgtgcttgctcttgccttcggcaaagaagttttattcttctgtttctctccctgtagaatctgggaactctcgactgattctaggttgacccgttctgaaatacagctttgcagttcaggactcttggaatgtgtccaaatgtaaaaagaaagcaggtaagatgtttgttagtaacaacttccaaaaccatattcttttctatgattttgaagtgacatgtgctctgaattggctgactccagacagtcaaattttaatcagttacacaaaggtggacaatttctgggaaagcaactgtgaagtcagaaatcaaaagggagctccgtggtttcaaaagtgacggcatctgccgagaaaaccatcattcaaacctccacgagtatccgtgagacttattgggaaggaaagaaccacaggaggctacgttttataaaacacagtgaagccttattttattttaatgctctcagatttttcttgggccttttcccccattgagccggtcaaagctttatttctgtgcacatatgcagatgacaattcctcacccaggtgcctctttgtcagtagagtcacacagaacttctgtgctgaagatgtcatggagaccaaaaaatcttgcagaaagaaagccagcatccagtgagaatcactcggagctggtctcgcatgtccaacccaagtatacaagaattggtctatgttctctgaatgctgaagagtctgattcgtattagagatctctgcatgtgaaagggagaaaatagggataataacgactaatgcagtatgtggaagagaaaacaaatccaaccgttggatatttggcaccgaatgtgcttaaaaattttattattagttaagctcacttctggccacaggtttcagcttgtctttaatttcaccagcctccgttatacaagacaaaaaggagactggttctatgcgcgtgtgctcgtgtgtgtgtgtgtgtgtgtgtgtgtgtgtgtgtgtgtgtgtgtgtgtgcgcgcgcgcgcgcgcgcgcgcttctacattctttacattttgagtccctcctaaagagggagatctgaaggcatgtgtgggctttgcgggttaagaggatggtggatatctctacatgacaagctttgcattggaagtctgctaaacaaaatgcgaagaactgctcacaaggttgtaaatcctcagtctgcaaggaaggagaaacagggcgaacgactgaagtaagtgtgtgtgtgtgtgtgtgtgtgtgtgtgtgtgtgtgtgtgtgtgtgtaatgtttgtgggttagatgagaagcgagagctgagtgaagtcgagaaggaggggtggctggtgtgatttgtttggtgttccgagccaatagaaatcccagcctgtgataatatccccacgcagcgcagagccgagaggattcagtgctgtctccagctccttccacatctgcaggcgcggccgggacgcgctccgccctccgcgcgctccgcttgctcggctcggctcgctccacacacccgtgctgcttccccggcctcctgcggaaccaggctgctgctgccccgggcgatcctgcgcacaccccgctgtggatcgtgtcattcacacagaggagagcgacaaggagacctaagacggaccccaggaggaggcttccaacccatcattgcaggtatgcggcttgtcacgactgatctgagacacacaggtttcagccttctgccttcccaaggcaactaaggtggattcaggtctgaccttaggggctggtacgcagagaagcgtggagtgaatgccctcctgaggttcccgggtagttaggtctcttgcttctgtgtggctgtggccaccaggtggattacctattggattctgggtaggtgaacagcagagacctttaaactccaccgcgatctttctttttaaataaataacatcagtacctacatattgccttgcgggtaccccttgacgatttccattacaatgatgacccatcgcaagtcaagcatcatgtaatggtttagaaagcaggctttgaacattgtccacctaccacattaatgtgctccctgcaggatcaggaagccaatatggacttcagcatggtcttaagcatgtggccaagtggatacagcctcatggctgaaataccactgtctctttagactgcctgaaggagaaaaggaaagaagcaaggcagcaatttgaaaaagtaaaacgtagttgtcttattcttaccttcactaatgaattaaaagcatatttgtctttcagaatcctccacaggatgagttccaaagtctctcaaattaggttaaaaacatacgaattgattccagcactcaagaggctgaggcaggaggattgtgagtcccaggtcagcctggactgcatagttacaaaataggaattggagaatttcgcactaaatataaccattttcaagcaatgtcaactcgtagctctgttttatttaatcgtcaaacttacaggtttctccctatttatttttgaggtgaaagttttgtgtgggctggggagacgacaatacagctattttcctggggtttcgccatctttgattcacaattttgaagttggttatgtaatttttcccatgttgattacttatgattaaattaacattgcttaatcagttccatcttcccggaaaaaccaaagagactgagtaactctgataaaagattggtcttgtttggagcagccctcaagggctaatatcataggcccttatcctctgtaagaagtgcatttcttggtgtgggggccaaacagagtagggggtctcttcaggatgatatgctggtgctgataaccagatgcagtagctgaacagcattcctcccagccagctcctaatacttcctggtagtggtaaccaattcattgatagttcatagttgactcagccctctgtggtacctaagtttcagcactgtccttatcccaaatcatgtgactggccaagcaagataaggaagttataagaaagctattcactttgcatatcaccatgaagaatttaagttgacccattttcttttaatcagatgaatgtgttctttcgtcactaagaagaatgcatgcgtagctctaccatggagataggaaaatatcacatttttgccctttgactaaagtgaatgatcacacagggcattttttaaagtcataacaagcagtagatgtgcttaagtaaatactatattttaaaaaagaacatgttagtgccataggtcaatatgtcttgcatttttcatcaccagagaaactgagtgtaaaatgttcactagtcaatgcatgtaactgaaccaacttaaatcttttacagttaaaatagttttttattattattattattgttgttgttgttgttgttgattattggtggtggtggtgtgggtgtgtgtggagggttgcatatgtgaagatcagaggaaaactcccggagtcacttctgtcctttcacagtgggatcttgagctaaaattcaggtcatcagactggcacagctgagccatcctgcaagcctagatagttttattatgagcatttgtcttctataacttatttcttcttgcagttcaactctaagccatgctgggtatgttggtattgactaagtgagaatccgaacattcactttgcataggcacatacatttgtggctttgcaaatatatgtctatatctggataaaggcaggggctatagacatatgtatgtacacacagtgtttgaattactcattgttttatgctatccttttcattgagaaaggtattccaatgttcattctctttaagcctcacaatagctagccagagctctagatttcctcaaactattacggtataatttaaacaaatcatgggcctttcaataacttaaaatactgctaccttagctcttttctgattcaagagaatggtgctcaatagtgaatcgagtcctgggttctattgatatgagataactggcctgactgggtcaaggtcaaactatgtgagcctacagcctcccaggcactgcagactgagccagccacatttgtgacccagtgctgtgacagcatatatgccaagaggcaggcaagagctcagggttagactcctgtaagcagttaggagaccagtaatgaattatttcaaccccagaaaatgtgcccaggattgggattctgacaagtctcacaaaggaccagcttgtaagatgaattgcttagaagaggaagacatgcaattataaatttgatctatggtgtcatctgcttcttcaattacctgcttctcttcctaccacataactctcttgtttctaagaattgtacacatggacttaataatgtgtaaaaccaaacctgatcacatatcagcctttaaaaatgtggtccttagatcatccattgcaacactaacctatcactttggcgtacttgccattgccaccacttctagtaggaaaatccccttggctattcagcacatcaacaggaccagcccttggtggagccttaatttgtagagatgagtcccagagccacgtgggagttaagagggtggagaatgagatgtttcatgcagcaagaatgtgaagtgagattctgtgatggtgggcagcttcaaatcagaaccaggagcttgaagaaaaatgagtctgtttcctctgattagcctcaaggatatatggttcattagatgccctgaatattttcaacactcttttctgtgttcccaggtacaccacacacaggtgtaagattggaataaacatatttgctgtactgacaagcctgggaatataagccagaagggggcagcatgcaaactcagaattaaagtggcatgagcttacaccaagtccccaatggctacagattgcctgctcaagcttctgtaccctcctccctttggaagacacagtctagagtcttatgaagagatatgtcacctagagggattgtttctaggtttgcttcagactggagtttcctgaaatacagagagcaataaactattattagtgagtgcagcttatatttcttttagctagcttcacctgttgactctactcaagcaatccttacacttttagaagatgaaaaaatgggaaaccacatgcagggaagaaatggagagaaagaatatcattctccaggctttaccaagattaatagccatttttgtttgtttggttttgctacttcttcatcatcagaaccaaacattattgtaagtatgtctctagtgtaagttcaaggccccattaatacttttggaatctgagctttgaaagcagagatgtggaataaactgtttcagtgatagccagaatctaaaacatgctaacaaaataagagtcaggcatctattgctaagagctcagagatggttaaacctagcccttcccaactaaattggaattcctggctattgagatttattgctgcctttatcttcagagatggttctgagggtacatgctctaaatgttcatagaagaaagaacacattgctgttacagagtgtaactggcagcgatgaattctaagtagccaggtgtcctcattaggtatcatttagcagcttagaggtgttagctttggcagatcctgtctctttgctctctctggtttatccaccacacagctcactactgtatgtgaggtctggaggagaggctcagaataggtctttggaacccacactggagatcacagagcagtctcattctgggaaagctatggttccctatgagtgagaaggcctggggaccactgggctccagatagatacctcagagaaaggcaaggcaaggtagtttggtcaagaaagcaagacttcaagcttgtagggtggattacaggaggctcagggaggtgcccatgtgtgcatgaatgagaccttgaaagcattcatatctactttttttctagggccactgtactctgctggaaatgtggtgcccttgaatcaaagaaagaggttttcaaggacaaaatcaagattccttagtgtctgggagaagagtgaggtcactgtgtgtctccccctcccccatttaaagtggggttggtttctgtcacactcctacttgctgtctagaactgtgtgtggtgccttgacgctggaggatctctgtgggaggagagagatttattcagggtccttatggaaccaagtatactgctgtaagaatagggtatagcaaggaagagagaaacgactaattccagagactgaggaatagtgtaagatttgtcccctctcatctaagacccagagcctcaaatgatgcttttcagttcactgtggcttagcagcccaccctcaacttccttcagatagcaaaataaaccacagctcatgtctctatctttttagaattatattgaaatttaaaaaccaaaaacctatagtcagagctttctggctggtacaataaccttaagtaagaggacatatttgtggaaacagttcactgaaaggctttttctgagtttttcatgcaagggaattggaaatgaagggaatgcatagctttagggaagttctctagatggggaggatttgaacatggacatgaggccaagaacacaaatactcctaaacatgcctctgctggtatgggttcatgcacgtcccagcctaatatttccacattcaatatcagagcaggtgggagggaagacattggtcaggggaccaccctactagtttatatgatatgctatgttgacatggtctagttaaaatattgtctgccttaaaagtgtcatccaacctggctttttggctctgactcaaggctgaaaggaagctagcctgtatgtcttgttcatttgcctctaactgctttcctgaagttatataacatcatataagattcccacgtgaatgtcattgtattttctaattacaataattgcattggaggaaagctgatagacttatatttaataagaattgagtagctgtaaaattgagattcttttcaccaatcacctctactagaaatctaaattccattagcttttcaagaaatctgtctttaatttcccctaattactcatttgaaaacctacaattcttctaacattttgtgggtgcatgttacatgccagacaataaaaacacgcatcaaaacttcaagtattaataagagtgtttgtgtaatcacaacattgaatagctacaaattataaccattcattcattcattcattcattcacataagcatattatttcacagatacctattgaacctctttctgcaataaacatagaattatatgtgtgctttttatttggcttaggcgtatatccaaatgagtatattagttacatgcacatgctctatttcataaactaaatacatgaaaacatcttcaaccttaagtttattgtgctgtgccatgctcttgaatgagagcatactttatttcttggtaccagattctctactcaaagagattactcaaaactgttccttatgaaacctttgagtgatacagaggtatggatttcaggtatgtatatccaagacttcaattctttgagtctcatccccccccaaactttagaggaggcagactacaaatgtcacttggtttcagacaatgaaatcatattgataccttcttgatcaagaagagtgttactgagatattataaaaaattcttaacctaaccaagtaaggcaacttggtttccatgctcacacatttttccaaaaagtctatcatttctcctgagttcacttttacactgaaaagatgagaatgcatctgtgtgcttcatcccaccttagttcttcagtctgtaaaaacagctgcttcaaatgtgactttgttaaatattttgtagatattatacaaatttttacaaaactcacagctattgttatcatcatcattatcatcattaccatcatccccattttacagatagacttatcaagactgcaggctttcagaatgtcacatagatgggcctagatagatggctcagttggtaaagaatttatctgagttcaacccctagaacccataggagctgaggagatgagaaaaggtctccaagcttgccagtcatccagcctcatctatttggtcagcttgagaccaatacgagatgctgtttaaaaaagcaaggtggctattgcagagcttccttttcaaacccaccttcctaacccttcattcaggtattcccaagtaggtgttgagcaggtgctgcctacagaacactctgcaagggtataggttagcacagtaaaggagagaatgttccattaagagctcagtatcatagggtaaatcagagtcataatccagaatgctggaattatagtgggaattttgctttgttatcacagctgcttgacaacagaatttacagtagttgttatagtagcttaaatcttttcttctctccattctgcattcatctacatacttctccatccagctgtgtttgggttgtgacttgctgtgtgatagtttgctgacatcttccactcactctcaaatggcccttgaggacagaggctgtttcttattcagtgttttatttcccagaccagaactggtgcataacaaacggtatctgatctgaatccactaagatacagttacacctaacttagaggtcggataggaggctgccctttatctcctaggagatatggtctccaaatgcttcaagcacacatatctaccagaagataaacaaacgatgaactccatcatctgccctggaattggtcttcccttcccttcccttcccttcccttcccttcccttcccttcccttcccttcccttcccttcccttcccttcccttcccttcccttcccttccccttcccttcccttccttcccttcccttccctcccttctccttcccttccctccctcccttcccccttcccttcccttccttcccttccttccttccttcctcccttccttcccttccctttccttccttccctccttcccttccttccttccctccttcctccttccttcccttccctccttccttcccttccttcccttccttccttccttccctccttcctccctcttccttcccttcccttcccccttcccttcccttccttcccccttcccttccttccctcccttccctccttcccttccttccctccttcccttcccttccttccctttcccttccttcccttccctccttcccttccctcccttcccttcccttcccttcccttcccttcccttcccttccttccctttcccttccctccttcccttccatcccttccctcccctcccttcccctcccctctccttttcttttcctctctttctttctttcttctgtctttcattttcttttcccctctcctcttccttcctcccccctctctccctcccttctttcctttttgccttaatctacccaacttcttagtgttttaaaatgcttattttggtaagaaagtcaagtgaacattaagaatcagttctctttacaaacatgttttactgctcaaacattataaatactaagtcaactattcttacggatttttttccaactgaaggaaaatgttctagatggtgttggggtgctactgtgaattgattctccattctcaggagaccgtgcaggttggttgtcacagtttggaatacatgctcattttctgactttacattgtttcgattgaaagctaagaaattcctgttggtgaagaagaagaaagtgataatgccaatgaaaacttggaaataacatcattgttttcatatggaaaactgagaagctggagagtttaatgagaatagtttgttctgtattgttttcaggcagcaggattttttgttgttgttgttgttatgcaagtccttgctttctagttcaggctaggctagtcatatccttttgagtataggactgcagatgtgaagcacagtgtctaactcagaggacaggtttttaaagattcagattttttttactgtataagtcgtatgaaaattcaggggacactgaactagaatgggctggaatgaggtaagaattgcatcttgtattctactggtctgtagttgaaatatcccagcctagcaacggatgtatcagataatagtagtgttaacacagttgtgtggaatcaaaagctattttgatgttatgttgctacatatatcctgaaacatcacttacactctccacaacctctaaaccaatcttattgttcagtgctaacattattcagatgcttttatttattattattatttacataagtatatgtatatatctttaaataacctatattttattagtttaaaattatcctgagaaggactctttagacttcaacagacaaaaaaaaaggtcttaaggaacaaaatataaaaacctcacccaacaagtagtaagttggtcttagtagatggacattttctttttttttttcattttttatttggattagaaacaagattgttttacatgacaatcccagttccctctccctcctgtcctcccctaccaccccccaactaaaaccctacctatcacatatcctttcttctattcttcccctgactcaacctttctgctccctcatgacctctgcatccctcctcttcttcccttctcattctcatagctccctcccccatcttcccatgctctcaatttgctcagggaatcttgtccctttccccttctccaggggacaatgtttgtctattttagggtccttcttgtttactaggttctctggcagtgtggattgtaggctttattgtatgtctaaaatccacatatgagtgagtacatatcatgtttgtctttttgtgattgggttacagatggacattttcaatcgcttgcaattgccactattggaaaggtgaaccaaaaatatttgtgctggagtttgggattaatgggatgtggttgacgggacatgcatctcatacagacttaggtcttggtggcaccaatcatcacggaagctctagatgctcaaaacaaacaggaatgtagacaaactgtctctcctttgtttgaatttccctggcttaagccagatggctatgtcacaaaagaagggtccttgtcaaaatacctcatggcacacgtctttatatatttaacatttggtctttaacattaataatttccagttagatgacttaaggtcgtacttgacagtcaggtccagtttatgtcctgaaaagtgcgagtctgtgggcattcagagccccatgctatatccaagatctattttcatagttctatttcctcttctgctctgtcagctcttgaagggctagatttttctcatctttatatcttttggttttggttttctttttaaacattttaatgatatatttatttttattttgtgtgcattggtgtttgtgcctgaatgtatatgactgtgtgggggcatcacatcccctggaactggagttagaaacagttgtgaaatgccacgtgggtgctggggattgaacatggaccctctaaaaagagcagacagtgctcttaactgccaagccagctctccagcccctcatctttatatctttaatatgttatattatacctgagtcataatgtctaatatttggcaagtgagtgaataagaagatctcaatatagaggccaccactgttacagaaagagtgatttcattttttaaaataataaattgtgggcaaatgatttaagaaagtgtattctgattttgtttgtttagatctgaaattcccccctccccccagaccatgttctgatctggaaaggtgacccagttaaaagagctcaattgttatcatacttggtgtagctgatattaccattattgttattattattactgttggtcactctttggacattaatagtcatcagaatggatgtccgtgaaggtttgctaaaagaacagttcatcactctaagtactttggaaccgagacttcaattttgtaaactgagataaataagctggagtgtttgggtctcaattttatctttgaagtagaaagaataattatttggaagaagagctaatcaggcactcttcacagaaccattgattcattcaccaagtatttatggagccagggctagacatggcaagagatcaaaagatggaccatgttttgaaggagcttagagttcatgtagaaggcaagacatgtgtgtcaacaacaaggacacaaggtgaagactggagaacactagtaagagaattgtgcaaataaggtctcctgagtttggggaagcaaatgtcatttccaaggaagtcttccggaatattcctggagaaccagacagatcctactgtgtgctgccatcatggttttcttcctgcttttgcctctttgtggcatatggcatgtggcatgtggcatgtgtttgatttgttataaatcctagagctttagatagggttgtaacttatttagtctcctggttttatagacatgacagcatcagcacagaagtcccttgtttttcacaactgcatgctggttcactgtagaactagtgctagaatccaggatgtcctctccccatcttctctcctctatcactctcccttatgggactctattgttaagaagcctatatcaacagtgcatgaagtgttataaggcaattttcacagaggtccaaggtacagtctaccacagaggtttgcccaagctggggaaaagcattgtgcttgatgacagtagatttcataggaagttttattgttgtttaaataggatctttgctttgcactgttcatttcagcactaactcatatcagagcttagactccccaaggctgagctccaatgaaactgccccgatttcatctggaaacccagcagtgtctgcatctgggctgggactaatgcagtagtggcagccactgccactccctcatagattttcaggcactgcagaaagtttgtgattccctaagtgagagcaatgactctcctcctctcttctgtttggactaaaggatttgtacggcattaggatggattatctctgtgatacatgtgctcaagttgtctcccactcccaaagcactgtctcctatagtccaaatgccttatttggaccggcttatttgatcatacttagaattcttttaactaacatatgaaacctctgaacaagactcgggaaagaaatgagtctgtaagagtctaccccctacttgctggtggaaggtcactctccggatagaagcactctgctcttcttagacaggcatgttggtagaatgtcctatctcccatctccccatgttgtctctggaagtacatacaccacagccagacatcccctaggaaagggtcctgaataaatagtggatgctcttttcaaccactctctattggatggtcagtgaatggatgagttgggaggaagacagactgatggagaggtagattggctggaggagatcctgcagtgccgtgtcacactatcagcaggcagatggacttttcaaagtggagcaagtaccatcctttgaagggagaagtagacaattaattctagaagaggaagtagcagagaatggagaaaggaccaagcagagcgtgtccagaccacagcatccgtatttcatgatggctttattcacacttaccatccaattccaggcaagaaatgtgcctgtggaaaaacagaataactaacaacgagttctcgttttgcagacattaggagcaaacatttttccattctattcttggagttgaaggagacagcgctgctgatgactgatgtgtgaataggcaccatatggatttgtacaaagggaagaaaataatccccagttgtaaaaatatctctggtcttcatagagtgatatgtgcccacatggttctgtcaggtggttttgctatagagattattcctggactaatagaaaaatgaccttttataggagttgtactttttcccagattatcattgtaccatgcaaaatctcacaacttcagaaattcgaaagatcaaaggcagagaggccactgaggcctcaacactcaccatacaccagcacaatagtttggctactagaaatgcttttcacagcaacacagaagtacttttatagtcaccaaacagtgccatgaaagcggatatgcatttctaattcttgcattcgatattgcctttgttttttgatggcagtaaaattccaattgtctccatatgatgaaaacactggccaactgaggcttggagctccagcgttcatattaactgcactgattttctgtttcaaatgacagccaaagctatcaaataaacccagtgatatttattagggtggcttctgaatatacagagtgtgattcatgacagaggctaatcttgcaaaaggaagggagaaaatgttttccatctgcatagccccctcaggagctggcatggggtagacatttccaccaaattctgtggatccttagaaaacttacagtatgtaggttggaagtaaagaaatctgttgagacgtgacagagttacaaatgatgccaacacattggtcactggtttagaatgtaagctctgttgtcaaagttctgatttgtgcatgtttcaccaatttttattgtgtttctgagtgtggcaggcattagaaatataaaatgagcttacttgctcacttgtgaaaacaaacaagtgaataaaataataacaaggaaatagtgtaggcaagagctgcaggtgtaacccagtggtggaatgcttgcctagcatgtgccaagtcctgcattccataaccaggactactatatgatgaagtataaaatgcaaaataatctagaacatacctgtaatctcagcatatgggaatgtgaggcaggaggattgctgcaagttccaagctaatcaggggtgctatcaaggatttgtctcaaaaataaaaagcaaaggcttttggagagatgggtcaatggctaagagtgcttgctgctcttccagaggacctgaattctgttcccagcacccatttcaggcagctcatagtcacctgtaacaccaactctagggaatatggtgcacaatctggcttcctgtatccacctgcatatgcatggcacacacacacacacacacacacacacacacacacacacacacacacacacgaatattaacagtgtgtgtgaccaccaccatcaccaccactaccaccaccatcaaaatggtctagacaaactgtgaacaaaccaaatgggaacagggtgaaattgagaatttgagtcactggtttcaacttaacaaggattgtcacacaagcaagcactatgctggagaacaaagccagcagattacagctttcccacatcatctttatatttatagcagtttaccttactggttgtcacatgtcacatgcagcccagcccacccccacacacacacacaggttctgcaacatatcagtgcttagagttggtgtcagccacaccatccctgtgacttgcagacttgtgcctcaagagtcacctttgcagtctctgtgtgtactctaagctaagctctggctgctgtcctttgctgtactctagagtcaagggccttggtcttagcttttttttttttccttgacgttctgtaactgccgtcatatatttccaaagattattggaatcgaagcaagtcacgttcaggtatagttctttggaaaaatgtgatcggaggaactatgccacggtaaagtccccatgttctttgtttcttgttccatatctggcctggctggctcttagtgtagaagaaagcagggcagagcaggtgtggtgtgtccagcctctatgtacttgaacaccagccagaatctaggattgggaaagcaactgcccagaggtcagattcctttcctttttgttttctttttccccttctcctccacatatgtacaagaaactaaccaaatgtttgttttcctatcagtgcacaagtttgggtacatctacgtgactagtggcaactgagttgaaatcctatttcacaacaaggtcttccctgaaggttttgaactgcactcgatagcatgttaaaaacaaaccattcaccttgtaagaccaggttggtgtacagaagtgacctttggtaagtccaagtgggacaatcaaagttaggatgggcccctgaataaacacagtgggcctcccatacacaagttaagttttccttcatggcaaatgaagcatgaaatgatgcatttgattcagggttcagcattatgctggaagaaaggctatctctcaactgaactcaggaatgttcctgatgtcatagtaacaaggacaataaaagtcagtgtctattgttcagtaagccccatcaagagtgctaactgccatcttgatagccaaagctaatttggtacttatcatgccaggaactaaggtaaatcttccaaatgtattgcagattgtaagcattgttagtgacccttgttcctcagtagagtgtcaagttgtctgtccttcatgaaaaggtagccctgtgtctacaaaccagcaaagcgctcactactgtctgaactaggcttagtagtaaatgctaaatatgatcttgtttacttttcaaagcaactcagagagccaggtcttattattacaaatgaaagtccaaagctgcactggcaatagtgaggagctggcattccgatcaggtctcctgtgctctctgtccatttgctcagcctgctccaggcagccccaggatgccttcccactgggttctctggagtctaaaatccctcaatagggaataacacagaacatgatttggaaagaaaatattatagagatatttaaaaattgatcccaaagtgagcgtgaattgcccaaatttgcacagaagaggggacacaagagaaatggggacagggaagggacagggcacaaatctgagaaggcaaaaatgtcaagagaaagagcttgggagttggcgaagtggactttgtggactccagtgtgggttaagctgccgtatacatgaagacatgtgtatgtgaacttgattgagaattccagggccacgttccctgaagttctggtaattggttatgtgctgattagaacatgcccactttgctgactgttttgtttcatttttttttttttttctgatatctggtttggggttgattagacctattgctgctttctggcatgttctacccacacaggactgtcctgacaatcactctaaattacagaaaggggtttccagcaaacttttctcatcctcttagattcccatccaatatccttccccagtttatttcccagaaaagagaggctaaagaacaaactgattcttgccctccagtctcttgccagatgtgtttactgcacatttcctctgcataagggactctggtcacatgcagcaagtggctgccctctgtccattatgcccacccagtaccatgtgtgcactccctggtggggagctctggttctgggaatcaagctgatgagactcctctcaaaactagggtgattgtaacatttatcatccaaactagattgctttcagagcatggagggggtgctattaataaactgcctgggataacaggcagagctggagctactgcagggcaaataaggacacgaaacaagcacagactggtcaataatatagtttcagccctcgctaacacagtcttagtcagatcatatgtgtcctttaacagactctgaggacaatcactgctgtaatttaaaaaggggcattagagagaaaaatgccatgctccagagctcatgtggaggggtttttttattgggggaagggaatagaaagggggagaggggagtaggagactggcctctggagacaggagcggcagaagagaagagagaggtagagagagggggggcagacagacagaaagaaagagaaaaagacaggtaggcagagaccttttaaaagggaacatagtgaatatgcacaggtggtgctcttagtggctgcagctgagggcgtatcctctcagaatcccaagggcaggccagtacagatgcctcaatactaacaaccacagccactcatgtacaaacattgaggacccactatgttcttgatgttcctgactggaggaagatctaccaaggatcccccccccaagaaagctcacagttcagagaaagccaaaatatgacttgtagacattagatcagcaacagtactgagcaattctcttaagaactttattcatgatacacatgccctgctaatttatttcgttcattgtttatttaatcctcacctaattccacaagtgaggcactgagactcaggaggatgaatttacccagggattcccaacctataaccagtggagacaaagttagttttcagtatgtgtggttttgaaggctgagcacagtatccacagagaatacaaggtacatgtcatgggagaagacccaagtgtccatgaccacagacaagtccctttctccatcttgtcactgctagtgagcacagaaggaaggaaagctcatcaaatgaggagacagttgaggtgagccttgatggatactcagaggggtgagtggagacaatagactcatgtcaagacatagtttgagtgcaaatttctccccaacagccctggtaagtggagacttacctgcctggctccacaatgaagaacaggaggggcccaaagtctacagcatctttgagacacaaggagactcattcacagagttgttccaggggaaagtttctgctacctttaagaatcattgaactctccacatcacagaggaccacaccaagaaaaatgacagcaaattctatccatcaggcaatatgaaacacaggagctgccaacgtgtttatttatttgagacaggatctcatctatcccaaacacacataccctcatacttgctaagtagccagagatgaccctatgatccttctgactccacctcccaagtgctgcagttccatgatcttcccaccaagcctggtttacatagtgctgagaattaaatgcaggtttttttgtatgcattcagtccattgcgatacatcctgggccctaattatgtgaattttgaagaagtcggaaagcataattttcattatcaagttttaaagcttaaatgttatcccaatctttttttttttaaatagtgtttgtcttcaaaatgtctgaaaagttggccttaggattctacctcatgctatccatgggaccaaataaaataactacaataattactttctcaccacatgaacaggttttataaatgaactggagctcagaattctggttttatgtcttttagaaatcatgggtgcagatgcattaattagtaatattccattccagatgagatttaatttaaaaaatcatctcgagttgtggcatacatccgtgctcttatcatttgagagagagaattataagtttgaggccagagtgaactacaaaaagagatgctgtcacaaaacaaagaaacaaagtcatcctaatcattcttttcttattggatacacctacagattattcaatggtatttttggttccagtgtctagatggcaaatctctcagaagcagcctcagtatatacagttcttcctgttgtatcctaggatccatactcttatcatttacttttatatctttacaacaagaatgtatgattttatagccatttgtagactaagcctgatttaaaaaaaaatagttcaaacatttttaaaaacaaacttcatcctgtggtcgagtttaaagcgttcactctccattccaagcatcataaatagcactattccttgcatgaaatccaaaagccaggttcccagggagggtcctgaactgacaagttttgatactgaaaatgtttcaaaatgatgacctacaaggccccttttgtgtgtgcacatacatgtacacaccctgtgatcatgcttatgaccagtgttttcccgatcatcaggaaatttaccagacctgtcatttagttgaaataatgaccagaaaatgttggaaagtggaagatataaggaggaaagaacaagggaatcaagaggcaatttaatctaaaaacagtataagttgttgcttttttcacaaacagggcagtaaggttgagtccgcatacaatctctattgctagacaatcatttatctaagtgtatctccaagcaatgcaccatctttcttgggaacttagctatatttctttcagttcactcattccctgaggacataatgagtcctcttctgtactggttactcggcaaagcactgggaagatgctcatggacaggaaatgtatgatccatgttctcatatagccaatgacagtggcagagctgaaaaagtaaacatgttagttactctgtagaaaatggcataaatggccaaggaactctccctgtgcatatgtcagttaagaaataattactgtggcaaggtggcacgtacctacaatctcaagcatttgggaggcagcagtgggagaaccacaagttcaaggccagcccacacagtttacttaggaaattccaggacaccctagaatttatagtgagacttcatctcaaaaataaaatggattagcacagtgaaacgaaaagcatataataacagcaatatacagccagcaagctggctcagtgggaaagcctgatgacttgagttcgatcccaaggaaacacaaagtggaaagaagaactaagtcccccaatttgtcctctgacctccacaataatgctatctcatgtgcatacatacatgcccacacaggaaacaaatacaaatgtaatgaaatatagtttcagatcagtgtcttaaaaaacagatctatgacacttccctgcccacagaatgctattcactgaatagaaagtcttgggcattcagggtaaatctttctccatctcactgcatgcaaatctcttaaacttctgactgcaagaccaatccaccccttttacttgagccagcattgcattcttctgtgttcctcctgctctctgctctggtctccccctcccccatccaacatccgcctgttgaaatcctacccatctttccaggcccagcttaaaggccacctgttccagcaagcttctccgtcagccagaatctctctttccttcctccatcctccctaaggactttacacctctttcagaatacctactacactctgccttgaaccatgcccatgtatacacatcgccgtgccccattggtacagcctgctaaaggtcagctggtaggcaattacaactctttgatctcagccaatgccctgtagagagactcacctccaggcaaagccaaagatgctggggaaatagggcaaagaagcgggaaggtggggagtaggatcagaaatagaacatagctattaagccactaaccacaacacaagaccattctggttggttttgactctttcaagaaaaggaatcacatcccatgcattttcttgcaaaatggattttcctaattgttcacgtttactggttaatcttttactgtgtccattaagctaaattctaatatagggaaatgagctttgggaagagcacagtgtatgtagagttctataatgtgtgaggcttcaggcaggaaatgcatccccctcctgctgatgggaagagtcattcaggctgctttatttattccatcccaactcacatttatttctgacacactagcatcattttgtagaggaataattgtctagtcaggaaacacagatttagatactggcttgacttttaatatcctacatgaccctgaacccctcttacccaagagataagcttaaactcagaatgcctacaacttttctcttaaataaataaatagataagtaaatgggcctgtgactgctctgacttcctgtgaatacgtaaaatgcagaacttgtaggaagtgaaaacaaagtagtgttgcattatatatgcgtagggatgtttcagagaatttcttccttagacagttttgttacagtgccaatattaaaatgtacctatgcagtcactggatgtggtgttttgatgggaaccagaaataaaatgtccatataacacccacatggtatatatactatagtaacttatattttataactaggagtaccctctaaaataatgattaaaggtacaatgtagtagctacatataccagcaatatggacacttcatcttgtgatcaagtactttcactgttgataatataaatgttagagtttttaaaaagttttctttgttcttgagaatctcatagaaggatacaatgaaatatggttgtatctatctcagagtccccccatatacaagatgatctttccaaacgtcatgtctttttttcaataacccagtaaatccagttagtgctgcctatatatgcactgatgtgaggctatggactagagcatgggactcctccaagtagtcacatcccccaaaacaacttttcttcccccagttgatatcacctgctaatagtttgttaataaggagtgtgctcaaagagcacattctcatttatgccaaaaccatggctgttcagatcttttgtaggtctagtgcaggtaggtaactatagttgctataagttcatggcacacagtagctatgccatgtctgaaaatcagcatttcaaaagactcctccctaccctccaacttttgccttagtcctatctcttcttctatactgttcccctagtcttggtgggctggaggttgttttacatctggaacaaagttaggcacatttgcttcaactcacaacaatcaagagggttacaaccagttcccagactgagaggatgcagtcactaggcagcaggagtttttcagctacataatcatttctgaaactactgttgtgtgcctctgtagtctgtcattttgggtagcattgtttcttatgtggttcatgtacacccattttgtacacccatttgctaactaggcaaatttcccacagtacctttgcatcaacaattacaggccactctcagaatctctgctgccgaagtgaccattaagagtggctagaatttaaacatccccaaagcagacaccagtccactaagttagcaattcaagtagggaaatcactctcaatccaatgggacagcattgaaaaatagtgcaaaatgcatatctacattcattgctgcctagaggtgagaaagttcagatactgatccacttcagctgtcaatcattgagtgaagagtgctcctgggagttcctgggctcttccaagttcctatgtgtgcaggtatagtgagttccagagagcagctggataccagtcttccattaaggaggaggatgctaggccaagtgtattaatctagaatgctcagaaatggtaaatgatgagagaatatggcagagtgatggcaactcccatttgaacagaactaattgtcagaccaaaggctagaaagggaactgccagagtaggtttaaaagcaagcatagcaaaataaaatagacaaatggacattttctgtctatctgaaaatgaagataggcgccaagcggtggtggcatatgcctttaatcccagcactcaggaggcagaggcaggcggatctctgtaagttcgagaccagagaccagcctgatctacaagagctagttccagggcaggctccaaagctacacagagaaatcctatatcaaaaaaaaagtatttctggacattggacccaaaatcaaaatctcatacaagctaggcaagtgatccactattagactataatcctatttttctttttacttttttattttgagacaggggtacagaaatttgcccaggctggaactacactcactctgccaagccaagctgaccttgaactctgactgttggttagctaaagtcctaggcagtcatgaagagtcctggctaggaatcttgagtcattagttctttgccaaaagtatctttaagcagagatgggtaaacattcctgaatttgactctgtaaaaccaactttatctgtgataatataagaaaagacctttcaactctctttgaaggaagtaacagaggcacaaaagtgaaacttgcctgatcagtttgctataattgtagcaggctttcttggaccatcagtccccaaatcatgacacagtgacttaatattagttgtaaatgtttagccttatgtttgtcccactagctcttataacttaatttaacctgtttctcttaacctatgtttggccttggtgatttttacctttcattctgtatgtcctacttttttgcttcttcggtaactggttggctaagagttgtttggctgatgttgtgtctccctctgtttttcccttgttatctcctccccagcctagattaccccttctgcttattctctctgcctgccagcactgcctatccatctactaactagttattggctatccagacttttattagaccaatcaggtactttaggcaggcaaggaaaaaaagtaaatgcaacacatctttacatagtcaaacaaatgcagcgtaggcaactatagcacacctttctttacatacttaaagaacattaaaaaatgaaacttatctttacagagctaaagtaatgtttcacaatatgcagtctttgtgtatttgctgtttggtggatgggggtgtggctaggagcctgcttcactgctcttctcccagggcccacctccttccttacactcccacaacaggtaccagagctttaccctggggatgatgtttttgcacttggagagttcactgagcactgaaaagatacacagaagaaagaacaccattgagttatggcactccctgagaagtctctctagagacctttttgtagggagtcagcatgcgtttctgctaagcagagaacaggagaaagtcaaactatattaattaccttagatcagaaaggacttgcacttctgctagtgatggatttctagtccaggcagctttacaagtattaatagtatccttgttcttggcagatgatggccctcagtgagcaagtaactctatgctcaggggatgatccattcttgctacatagccatcttcatccctggtttatgttgtagcagagaaagcttgtctttaaagctgtttcagatgcatccccatctttagagttagtctcagaaaggggtttctgctctgattctgcatgggttttctttgcttcatttctccatttttaaacatggtctatgatttaaaagtacttaaattctctgaaaccatcctttgagagttccaatgaagaaactgttttgagaagcagcctattggatgggaagcccccttcctctgagtgctcattgatgttttcttcacacagaggactgacatcacatccactcagaatctgcagggcttttcactatccaggaacctcagttatagtcctgagactgtgttctctgtatgcctttctttcatccattcaattctaatagtttgtaggctttcatccttttgtcactgcctaaggacagtcatcacagtgttctagaccttcttaaacatgtccctttatactcctgtcttgtttcaccctcttccaatttctggcgtacaccttaggcttacaatacacttttatgtaacttccttgtctaatttgactctcattacacactttggatgtcaaatgaacaaaaatgacactctcaaaatacacaaggaatgtgtttcttaaataaagatctggcacttgacatgtatacgggggcccagaagtttctttttatagggatagaggactacagacagaccccagtacaagttctatcactgaaccacacccctagtctcaaagcttcgtttttgtccctccccagccctttcttttcacccctttctattctttcaagaatagaaagcagaggctgggacgacggttcagttggtaacatccttgctgtgcaagtatgaagacgtgagtgcagatgcccaccagccctgtcaaagcctgggcacagcatcacgcacctgcaatcccagagctgtgcaggcagagaaaggagggttcatggagcttggtgctcagctagtctagccagtcaggaagctcctgatccttgagaacattgtctcaaaatgaaaggagagagcaattgaaggaaatatcagcattgacatccaatcttcacatgtgcgtgggcatactctttcaccacacacacacacacacacacacacacacatacacacacacacacacacacacacacactttaacccctacacacacacatactctctctctctctctctctttcacccctacacacacacaacatacacacacacacacacacacacacacacacacacacacacacacacacacacatacacacaggaagagatggaaagaaagggggacagaaatggcatacactgtcattgtctttcctgttccttcggtcagccttgtatagaaaaggaaatagcacgattctgagagcagagacaaacttcacaaatagatatgacaccctgagtcaagcacaggtgaattagataaaggggagagttggagaaggagtggaagaagtgactcagaaactagagtttacagagtagattcattcagtcagatggaaattgaagaagacaattcaggccctctatgtgtgtcttacacacccatatagttatcaagtgatttcactatgtagctcacatttcctcacatctgtcaagtaggagcaagaattattttcacattgttacacgtgaagaccttaagagtggtgttgggaaatgccttgcccaatgttctctatgtctttttatctcaaacttgtgttccttctgacatacattttcctcaaatgtgcattgagtgaaatgacaaattttaaaaaagaaatctattgtagaacttgtcagagcatctactcaaaagtcaactttaccactttatggacttcaccagtctcccagcatctggtagacagtgggagtaaagatcatgtgtggcatgtcactgcagtgaagaatctgacaggtggagccttaggaactctcctgtcttcacagaagtaactgccaggaaagagggagaatcttctaaaccagaaaacaccaaagggcagatgagtgcctgagggtgaaagacttcttccactgggcagaggacatgtggttgacagcatcagcgagtggtctaaactaccctctccctacgatcccagtagctgagtctctcattgaaaactgtacactagctattcagatgctgaagggagtgcagaagagagcgagagtggataagaacccagcttcttcagaagacagatatgtaacaccctcaagtcagctttgccacttccccactttataaatgtaggtccctgggcctgagaggaaggtgcagaggttgggaaattgtattattcttttagaggtcctgatctaaactcttagaacctacagccgctggcttacaatcagctccaggaaataaattttaaaacatttaaacttccaaacttctgccctgaaccttctccttcattaagtaagctatgctgaggagtctctaaagcaacatttcaattaaactcatgtaggactgggcaaaggtgtttaggagaccatagtttgaaagacagcgaggtgttgccttgccctgtgcctctagagcaggtgaggggctgtttgtgtggccactttagtcctgctgtttaactccgagatctctttttataggtgattatcttattaacttccttaagcagccttaaagctcatgtgctcttggcagagacacatatagatttatggcatagcatctgttaataattccaaattcatttatttcaccagcagtgaaattaaggtcttggagcctgggtggaggcaagttggaaacaaatcaaaacaaagtaattgactgggaaatatggcagactaatgagaagcattgttcagaaagcccctgtgaggccagccagggtcctgtcaagtgcttttgcaccaatttcctgagatgagcaatgaaagcaaaagacagttacttttctaaagtcatggaaaaggaatacatgtcactcctcagctgtccatggggacacccacttccagcattctgtttgtgggttagcccacatgtctacaaagactcatgaagcactctcaagaaatgatgactaagttcctgcatattttgtctttagtaagcaagatatttatttagttcaattcaccacaattatagcttttctcacatttagcctgagttctgttcattttcattgtgaatttctataaacttacccaataaaaatgcaagataattttatatggaatatatataattagcatatataatttatggtttaaaacttgctaatattattagctagatacctcacccatttatgaatcgccaaacaattcatcttcaaacttgccattaaggctgatggtatatactccaatttctcaaggagatctgtttcatgacgctttggtttgcagcgtgtgttcaaattacatccactttaattgtaggcccacctcccttcattactgttgtagatgcatagatacataatcaatacaatgaaattaattttatttaattagagacagggtcttatttggagccctagctcccttgcaatttactgtgtaaagcaggctagcctcaaaaactgatcctcctgcctcagcctcccaagtgctgggattacaggcatgcatcacgaccctcagcttccaatctctttgcaatgcccaaacggtgggaataaaaacagaaaacaacaagaaatctcttctgaatacacaaggggcagagcacagttgtgtgtgtcactgttagagaaagttgtgcctgtggtaaagaagagggttctaaattaagaacacattatgatttctttcttctcctgcatgacacatgacaaaagaaacatgcttttaattttagagcatctctttgttgaaataagttgcagaggcatcattttatagctgactcatttccatgttaatttttgagtggagccactatttgtttggttatcaacactgctgggaatgttttaaatctaaattaaaaaggagatcttcaccttgcaaacttgggaaaagaacataggaaggcccagtctaaaggaaggacttattctgacactgcctataaacagagacacagaataatctggaaaatttggctaaaggttttaaatatgcatctcattgacctgctcactaaagagtaatagaatctgggtatagtggtgcttgtccacatttacagtattccggagactaagggcaatgaccacaaagtcgtagccagtctgggatacatagagtttgcaggcagcctaagcactgtatcaaaaacaagaacagaaaaaaagtaatagaaatgagcaaggcatgttcatacaggatacaaggtacgtcataatacataaaatgtaggaaacagacatttcaaaacagtttgtgcactgctgtctacaaagcacattttcacatttgaaggcaggcatatcatgagctattgcaaaagcaactggcagaatttaatgaacttcagtttagatattaaacctgtacttttatcataattgagaatcttaaattttaagaagaaataatttaatttcctaaatactcccccattgaacccaaaataatgttgtttttattccaactaattaaattttaaaaatatcagtctcattttaataaaatttgtgttcattgactgtccccaccccaccccattttctattccagtattaactaggccagccagggttgcttggcagttttggggattataaacagttaaaaataatagttaatgctattgataacatactgccattattggtctttttatataaatataaatatatatatatacatatataatttgaatttttggaaactttagctgtgctgtcaactttggaaaaaagtatcccagtttaccgcattcagttggcattgtacaaaaattaacagccatattgttctagaaatgttgaacttaatttttttccatttgtacaggggtaacacactgtattaaatatgtaaggtcttaaaaaagaaaaagaagggattttgagagcccatcccatgagaagggatgctctcttgacctgaacacatggggaaggacctagcctggcccaggataatgtcgtagactttggggagccccctttgaaggccctaccctgcctggggagtggaggggggatggctaggggcaggtgggatgttggggggaggggagggagagggagaagggattgacatctgaagcaagcttgttcctaatttgaactaataaaataaaaaaatagttaaaatagttgatagttaataatttaaaaataataacactgttttgtcactaaatcaaagctatgattctcaagggtttgtggcttgcctgaaacctaaacagaaaaatagatgtggatgataataatgcatcctaccgtcagaaatcttcctcactgaccccatagggaatcgggaaagtcagtcaagaggcacaaggaaggttcattgacaagattagcagaaggcatgattgggcagaaggaggtgggacaatgaagcaaagtgcaaagacaatacaaacgatctcatgtcttgctgcagacaatcaaataaccacacagagacttctttttaattatgaatgctctgccttagctttttcttgttcctacctagttctcttaacttaaattaacccatactgtttaatctaagtttaaacttagattaaactagattaaatctaagtttaatctaagttccattatgtggctcggttacctttactctgtactactcatcctacttctgtgcctggctgacgactctgcctttcttcttctgtgatgcctctctgttcccagaagtcctgcctaacctcttcctgcctatattggccattcaactctttattaaatcttcacacagtataaaggaatattccacatttcccccttttgtctaaataaaaaggaaaggttttaactctaacatgataaaactataaacaataagaacaattattaagtaagaattatattcacaatttccagtctatttgtattttgcatatttgtagaaaatactgaattgtctatctgggtaaatttgaagttctatacgtaaaccattttctatcataacttgtattaccatcttaaaactacctttttagacctcaaaacattttcttagataaacaatttaaacctttatgtctctcagctttataccttttatacctcttttgtgagtttctttttcaaattgtgtatctataactatcttatcttcaattccatcagagacccaagaaggatataatattacctgagtaaacaggaagtgccaagcaagcaccttccaaaactatagaaataacagaaacagctggcttcctggacagtcaccacgtttcctctgtaactctggaacagccatctttggcccacaggcctagacaatctgatagacttttctgtgaagcagaggttttgaaggattgtcctactttgtcttggcagtgtctagcagttactttctttcatgtcctgcttatccagtttggatagcatactgtgagcagttgaggcaagagcattttcttacccaaatggctagcttttgacacaaagaaagcaaattccatatggaaattctttgaagctctgcatacttttttttttttttttttaagaatattggtgccgccaggatcagacatgtctcactgtcataaaaaaaaaaaaaaaaaaaaacctatggcacttaaacattttaaatgcaatagtctgtagatctttgaagtgtttgaatatcacctatctatctgaaatatgtcttttatgaccttaaaaacatacctaacatgactataagtttgatataaatagttactaacctctgatttttattatcctaaatagctttcaagtactaaaattttgcattacatttttaaatgagctctgtaagtacaatacctttaacaagaatagaaatacatatgacagtataacaaaatcttaaatttgtatcagtatacaaaaattcataccaatgtaaaatgtttgagactagtgattgtttaaaagtagactcaataattcacccttttatcccatcatttcttttttgttctttttttggggggggggtttctagacagggtttctctgtgtagctttgaagcctatcctgacactcactctggagaccaggctggcctcaaactcacaaagatcagcctgcctctgcctcccgagttctgggattaaaggcatgtgccaccaacgcctggcttatcccatcatttctatgtccccttttttcttttcagagagattgtgaatctaatctcccttgcttagtttcctccctgagcatgaccaatagagattataactgacccccttaaaagatgataaacatcaataacccgccaaatgaccaaaaacacccatcctacatcttgagaatatgggtgttgtattctttagactacttcctgttgtctgggggtgatggcatctttaggggaccctgagaagattacgataatggtcaagtcctgggagtgctagtcacaacatttgttacccagtctctatgaaatgggaaagcacgaggcttatctgcagtcctggctacaatagtctatgatgctgaacaatctcagctatcagccttgagctattctggatggaaaattctgaggaaacagtaacagaggcattctaagaggctagatcacctggaccatctgtttttatcagtgcctggtcctctttttctaaacacacacacacacacacacacacacacacacacacacacacacacacacacacacacacacatatatatatatatatattatatatatatatatatattaacaaacctaatctttatcaaccttgaatgaatccacagcctttcattttctgtggaaacaaaagcataacctcttcctcagagcacaacattttctcagttccattttaaacttgaggctggtttagttcagaggtccctcttacagttccatgtatcccagcagctgttgttcactcctcagcaatcaaaaatttcaagttaacaagacaccatatagaatccatattccctgtgtatttcctatccttacatgccctatctttttatattattatattttctctttaaagactttatttataggctatttttctatgactgtctatacccattttcttttctttctttagcatctaagcacatttttaaactcactataactgttcagaggtattcttgatctggactgctttactaagtgtctgcagctgtgcaattgcaacattctctgacacacgtgagccaaactttaaactgctgagtggtggctaggtcctctgctactagcacatggcctggcagttgactctgcccccttcgggtctgtgactgtagagcctcatgcctgagtgcccagcctggacccagtctatccatcccagcttcagtaagcgcttttacctagtctcctgacagtgatagcatgctgcctgcccacttataaaccccatttaagtgccccatcagagcctcttaaaagagccacacctctgtatgctaagcctacccaagagactgctttcccaagccccatgtggaaatgtgtgcccccatgttatatgccatttgcaaccagtctttctctgtcctacctgccagctcctaaataaccacatggagacttcttattaattacaaatgctctatcgtagcttaggcttgttcctagatagttcttacaacttacactaacccatatcttttaatctatgttcttttacatggctcagttacctttactctgttcttcttctgtgcctgactggggactctgactttcttcttccccaagatctctctgtccccccaccagatgtcccatctagcctctctttgcatagctattggccattcagctctttattaaattgatcacagtgacacatcttcacagagtgtaaaggaatattctgcaatgtagatgtcataccaccgagattagtgagctggttcgcacactgaactcctgcatgtttctctgttgttgactctgttcaccaaggaattcattcactagaagatgtgtgcttgtttgatactggaagttggaagtaatattttaaaagtgacattcatagaccagaatatgactaaactttatttgaagcaaatatcctttcttggactttctcatgaatcatgagtgttctgtgacttgtggttttgttctttctctctctctctctctctctctctctctctctctctctctctctctttctctctctctctcttttaacttttcaacatggcacctaagatttgaagttactcttgattttattcctgtgtgctttttaataatatataaaattagtgttgttatgatgttgagtgaataataagttaatcaaataagtgtagtaacacattgtgtctaacagttgtcctttaggcaatttctagtaagtcactgaaacaaattttattaagtaattcttagatttgtattcatttccactatgcaatctcagatctattgccattagaagtatgttctcatggacgtgtttttgttgttgctgcttttgtttatttgtttgttttttgtagtgtgtacacaaaaataaaaaggtaaagcaaatatggaaaatcctaaatagtgtaagcttgatgccaagctatcctactcagctgcagatctgacaatacaaagaccatttcctcccattttctggaagtctaaaagtcagtggcgacagacagctataattggggcaagaaatttccattttattatagtgactacaatatgcttgactttgcctgtctgattcttggtactatttgactttgcaacttctattttagaacagaaaggaaaaaatttggggggttaaaatgagtactgtgtatctataccacactttctttaactattcaatggattgataacttttagataaatattggggagtataaccaagattgaccatgaaattcctagctaagagaaggatggatgttgttacaatttaataaagaagacatctgggctgtggtggcacatgcctttaatctcaggacttgggaggcagaggcaggcagatctttgagtttaagacgagcctggtctacagagtaagttccaagacagccagagttacacagagaatccctgtctttaaaaatgcaaacacaggcagagaaacagacagagagaagaaagagaaggagcaggacacagagataaaacatcacaaggagttggaaagtagtataatgaccaaagcataactttaattttggacttgtgtctcaatagatcttgtattttaagggactggctttgtttgaactttggactttgcttgacaatgggaaacacttgaaacaaatcaacttaagaacatgaaacatttatcttgtctcacagtttggatgtttcagctcatgcttgaccctgctccccttacctttggtgataaaacacatcaagaaaagagcaggtaatggaagatgcttctcatcttctgatggatgggaagcaaaaagatagatctgaggggacagaggcccaatattccctctgagaccacacctaccatacagaagacatccaaccaaaccttacctcttaaaggtcctactgtcacccttatcctccagacagccccttgggttgaggacaaaccctgttttaaacatagggtttttggggtaggggtcatctatccagagcatataatggcatagagagtccactccaaaatcatacactcattttcatccaatccttccccctcccttagagtccttcattactgagtgttgcactcactgacataagttcttttccctttaatagacctaactacaaatacatgctaactctatctcaactgtgcttatcactgctttcataggctgttttcagtgtcttaaaggttactgacctactgcccaggtacaggattataattctatttgagctgtaaaacaggtagacagccagttgggctttgttatataactgataatgttcctcagagcattcccttgaatataccttattcagaggcagaattaaataaccagatgctgaaatgattaggctgctccataaaaaacatctaaatgtggatgtttctcattaaactaattcaccaaggaaaaggccagagtctataaggaataagaattacaggacatgcatagtttacatctgaaaagttggcatcaattccctgtagccattggcttgaagctagcagacaaaatggatgtcggtcatgctaccattgctaaatagtaagccgatgggtagaagttgttgagctagcaaaggcttgtttaatttcattgaatatagaaagcctaactgtccaatgatatgaactccttcactattggctttggaattcagacttttaagagtggattctaatcatacaatgacaggagacactagtgggataaactcaattctctggtgggtggctgttccacattcttctactagctatgtgcaacatggtttgcacaaggccctgaaaatcatgggcctgcctcaatatccagacaataccttttataaattaaaaaattcccaggattccttggatctttgtaaatatactggagtattcaaactacaattaaaactaacaaggacaagagaaaagaaagaagatgctgatttgtcactaggccagtgtcaagttcatcttggatctaaaggtgccaaaatcctcatggggccctgtgggtgtaatcagactcccctctggatccagccagttccaagtggccatgctgacgtaggtagctggtcttggcagtcagcgtgtctccacaatgagaggattgatgggagcgggcagcacagccatttggctcccctagtcgtttggtgctcaaataaaatctgtaatttcaaattcccagtttgaaaaccagggggtgatcggtcatgtcatgtgagattccaatgagcccctctggtaaagttgacctaagggcaacaagtatcatatgtatcaaaccagagttcacatgaatcctttgctataggttaactcaaatcagaaaatttcactctagcagaagtctcagaaattggcccatttgaagggctcttgtttcacagcagatggatttgcacaggtctctaaatctctaggatacacccaattttatggactttctatcccagagttctttcttcagcccaattctacctgcttctgggagaatgctgttcattaagttgagtgtaactagaatatcacacaaaagtatttaaatttttttcagtcaaagtacaaaatcagttttcccataaattttagagaaaaaaatagtctgaatgtttctattaaagatattctagttctatgtcaacttcatgcttatgaaagataatacctaccgtatgtattctaaatgtttattaattaaatgtgtgtgtgacaacctgaatgtggagggcagacgataccttgcagaagtcagttgtctcctttcaccatgggggtcctggggattgaactcatgatatcaggcttggcagcagtcacctttacatactgatgagtcggctacaccaatcatgaaatattatacaattgaaattggtaacaggtagatatccagcatatctataggaatattttaacacatgagtcctttcttgtccataccccagtcagattcagtttgtaataatgcgctaaaccaggtccagtggtgattttgtattaaagtgcagcaaagagattaatatattctatccaggtggttatgtccatggaccttttatcaaagtagctaatgtccttctttaaaaagaatttgtcacatgatgtaaaaatacctgattaaatcaattcacctgatattgtcgctttttggagaaagtaaagctgtaaagcagaattgtccatgccaactgagtctccttttgaggagggtactgtgaagagtccatgcacagagcagcagcggctcattgcttctatgcatactccaatgaactgggcccaacacatgtcagagatggtcagtgaactgtaagaagccagtggacaggcatccatgtaccttccaggaatctatcaggagccaatcagcaaccaattgggaatagagagagaagtttctattgcatttctagaaaaaccaaaatttagttatgcctgttgatatctgataagctatgcatatttaagaggtataattttggcaaagatcactgagatgaagatactgaatgttgtcatcactccagaagtttcttctggcaactttgtatcctcctgtcacaactcagtgctagaattttgcacaaatggaatcatctagtatgtctgatttctttcacttggggttgttgttttgagattctcttgtgctgctgtacactcacagttcatactcatctaccttgtgtgtgtttatgtatgtacacatgtatatggctgcaagtgtttatgtgtgctggtggcagtcagaggtcagtgtggatgtctttctcaatcactctctaccatgtctgttgagacaggatctctccctgaatctagctggagctcattttggccagcctagctggcagtcaagctccagcgcatcctgctgtctttgccacccagtgctgggatcacaggtttgtgcagcagtgaccagctttattagattgtttctttaaagtagttttctcaagatccaagtcagatcttcgtgcatgcacaagaaacactcaaaactctgctgatggaaatatctcttcagctcatctcattcttcccctgagaaccccagcattgcatgattctatctcagtttctttatcctttcattttctgctggatatctggattgctctacatattatgtagtcaccactgacatagaaataacaatttcctcaaaaaatagtttcctctctcttgattaagtacctggattatatggtaggtgtaggcttaatgtttttaaagattccagaactttccaaagtgctgtgcaactccacatttgtacaatgtcaatcacaaaaatctataataaggaaatatggccaaggtttgaaaaattaggaatggcctcaatttgaaatttttagtttgttaatttgattgtagcaaagataagtgaatgatgatatggtgaaggacattatacacacacacacacacacacacacacacacacacacacacacatatatatatatatatatatatatatatatataaaatttatacatatgggagctatggaaacctcttcagtagtactttgtcttgacctttaaaaacataaaaataataacagaaagtgccccaaagccatcttgaaatttcacattcatacatacaataataggggatcccttatccatgcagaataaaatattaacataagataaatataaaaagacaaaaagaagtcaggggccaacagcttcaacagagtcaaaaagtaatttttaatttgggggattgtatataaagaacaaaatctaaacttgtaaatatacaaatggtgaaaaggaagtcagtgttcttgaaggatatcctgtcatgggaaagcagtctcccccagggacaggatttactgtgaatcacataaatgacatctaccaaatctacatgaaatatacctccaagtccagttccctaaagaagaaaagtgcaaactatgcctctgcttacactgtaccttctaatacacggccaaagatcatagtggaatgacattcagtattatagaattacaaccaacagtccttatttctgtagatgtcacagaaaaaaaatgattgtgtgcctatattgcttgtcccctccctgtctctgaagatcatgcaagggacatggtagaactatgagttgtcactaaaattgtcacggggtttctcctttcttctaacaaatcacttcagaaatttcaatactagatacttgtggagatcatgcctctaatatctccttacatgccaaacatccaaaaactacttggtgcctgtcctcttacatgttttattttaaaaggaacattaattgtgaggaatattaaatacattggtgagagatggagaggtaggttaaaaatattttttgcacaaatgatgtcatcaagcacctaagctgttggctaaggtccacatgagtctccttgactaacatcctgggaaactcagacaaaaggtagcaactctatcctatgcttgagttaatagctggacacagaacatttttttccatcctcagctattctgttcttgcccaaatccatttgttatgctgttattatagaatgtattcataccgcaaactctgctaactcaatccctaccctttaatatgcaatagccaactgacagacgtccactcaccatgaacttagcctgaggagcactgtgctctctagttaggagttttcaaattttggaggcacacgacacttgacatgtagggacattaaatttcaaacgttatgcttttaggcatgcacacacatagacaccctgtaatagaacagtcccctcatgtctgcatgggaagttctcaaaggagagccctgtcagatacaagttctttcctctggagacatcggaaatcctgggacattatccaggaccttctcctttggtgtctttcccacagagaaatagtaaactcgtggcgtagattacacctacagtgaaaggagaaactgaacaccaggcagctcctaaaggatcaggtttagagtccgaacaccacctgttactatgggagccataatccccagaagcacaaaatgactgcgtctcagaggaaggacggcttatgagttttcaagtggcctgtcattttttatttcagtcacttcattagggtgggcaggtagacaaacttccagtgccacactcacagatgggtagagttcacagagaaataaagtgttgggccatgtgtttatcgttagcaatctcaacttttctgagtcagcaacaaagcagtgatttcatcatctgccctccctaaatgcacttggccaaccgtcctccctccaaagaatgctggcgcccttgccttgggtaaagaagccttgaattaaccagaagacacacaatatcgaattgagtgttcacacagaagctcactatgcatgtaattagtctttttttttattagtcactcatcttatattttagtcaatcagaaagtggacttacagggtggatggaaccatggatttacctgagattcagatctcaacagaggccaattcagaacttacagcttagagggtctagttggagataagctgcttttctctctaaaatatccattccatttctataagcagagatgctaatatttatgtggaagattgaaaggagtattcactatgtcatacaatccatatcacagtattacattcaactagttcactttagttattgtttgtgcatgcttattttgtgtatgacaaattttgtaaatattctttaagcatctcaaagaattcttttcatgaattcttcttatgggaacattgaaatgaccgattctgggaatattttgtatcatattccgaggaataattctgagctatggtatttaaagatcttaacttttcttctccatgtctaccttttgcctgagcctattgggatgagcaaataaaatgtaatgggacttgcttagaatggtaaacttcagaaagcccgatttggctgttctgtgttcagacttcccacatacagatgttccttcctagtacacccttgtaattagttcattctctcaggtatcacatttgcttcctgtatctaaacccacctgcagggaccctgtgtcatgttcaacaccatgcaatctgtaagggcaatacatgatggtagattgtatagggattatttcttgactagcttcacaaataacctgtctccttctcttctgtctactttttctttcttctctttccttttcttgttgtactggggattaagccacagcaacttgcacgttaggtgagaactccataatggagttattatcccagtccccttccattctttatccgttaattaattttgttattttatggatgaatgattacttgatgatttcatataggcatgtattattttctaatcactctttcctcaccatctatcaattccttccatccgtctgaagctttccccacttcccattccaaccagtcccttttcagactcattttgttaactcctttattctatccaggccatctgtgtttccattggatcaatactgtctactgtagtgtgttggatcgtcaacaggtatataactgaagacaacaattttcccttttccctgcagctataagtagcaaatagttcagcagttagtgatagggttccttgtacctctcctctatctgaatttcttctgtgcatctggcctactaaggtattgcgtaatcagtctcttcttttgctaagttatgtgttgtaactttctgattgcttccccaagttaattcaggagattcaggtgacttgtgttcagtgcttccttgctttgcttttcagctcttacttgaataaccagctacgtgttcaatagacgagtgagtctactatatatggtgagtctacctgaaagagacgacacaccaggaagtggacctatgagacaaattaagcattatgattttaattaaaaaagcaattaatttgatgaaggaaagatgactaaaagcattaaccaaatgatcctaaatttaggaccaaaaatgacccacacacacacacacaacacaccacacacaaccatacactacacatctaacatctcatgaccaacaaaagccattaaatcacagcgaaacaaatatagtaataagagtagttgccaggaactgtaagacgtccccaccggaccccctcaccacccccctctcgcacacaccgccacgggacaccccccaccccctccccccttctcccccccaacgcccccacaccccccgtcaccccctgaggtttagtctaagcacaattgcttaccccagcaggcacagaaattaccttaggacacatagcctattaattctttatgttaaacaatcacggcctgaaccatatggaatcattatacattgtcctatattactttcttttgttttgatattattattttaaaaaaatctatccgtttgttcatgacctcatatgattagacaattaaaagatagtggctgaaaagatgtttcagcagttaggagtgttgctgcttttgccaaagaccaaagttcaattcactcctcaaacagagtgactacacacacctgtgattcaaggnnnnnnnnnnnnnnnnnnnnnnnnnnnnnntttaaacctttatgtctctcagctttataccttttatacctcttttgtgagtttctttttcaaattgtgtatctataactatcttatcttcaattccatcagagacccaagaaggatataatattacctgagtaaacaggaagtgccaagcaagcaccttccaaaactatagaaataacagaaacagctggcttcctggacagtcaccacgtttcctctgtaactctggaacagccatctttggcccacaggcctagacaatctgatagacttttctgtgaagcagaggttttgaaggattgtcctactttgtcttggcagtgtctagcagttactttctttcatgtcctgcttatccagtttggatagcatactgtgagcagttgaggcaagagcattttcttacccaaatggctagcttttgacacaaagaaagcaaattccatatggaaattctttgaagctctgcatacttttttttttttttttttaagaatattggtgccgccaggatcagacatgtctcactgtcataaaaaaaaaaaaaaaaaaaaacctatggcacttaaacattttaaatgcaatagtctgtagatctttgaagtgtttgaatatcacctatctatctgaaatatgtcttttatgaccttaaaaacatacctaacatgactataagtttgatataaatagttactaacctctgatttttattatcctaaatagctttcaagtactaaaattttgcattacatttttaaatgagctctgtaagtacaatacctttaacaagaatagaaatacatatgacagtataacaaaatcttaaatttgtatcagtatacaaaaattcataccaatgtaaaatgtttgagactagtgattgtttaaaagtagactcaataattcacccttttatcccatcatttcttttttgttctttttttggggggggggtttctagacagggtttctctgtgtagctttgaagcctatcctgacactcactctggagaccaggctggcctcaaactcacaaagatcagcctgcctctgcctcccgagttctgggattaaaggcatgtgccaccaacgcctggcttatcccatcatttctatgtccccttttttcttttcagagagattgtgaatctaatctcccttgcttagtttcctccctgagcatgaccaatagagattataactgacccccttaaaagatgataaacatcaataacccgccaaatgaccaaaaacacccatcctacatcttgagaatatgggtgttgtattctttagactacttcctgttgtctgggggtgatggcatctttaggggaccctgagaagattacgataatggtcaagtcctgggagtgctagtcacaacatttgttacccagtctctatgaaatgggaaagcacgaggcttatctgcagtcctggctacaatagtctatgatgctgaacaatctcagctatcagccttgagctattctggatggaaaattctgaggaaacagtaacagaggcattctaagatagacccggacaccttatcagtgctggtcctcttttttctaaacacacacgcacacacacacacacaacatcactcaacacacacatccacacacatcacacacataatatttactatattatattactatatatacaatataaaacaaacctaatctttatcaaccttgaatgaatccacagcctttcattttctgtggaaacaaaagcataacctcttcctcagagcacaacattttctcagttccattttaaacttgaggctggtttagttcagaggtccctcttacagttccatgtatcccagcagctgttgttcactcctcagcaatcaaaaatttcaagttaacaagacaccatatagaatccatattccctgtgtatttcctatccttacatgccctatctttttatattattatattttctctttaaagactttatttataggctatttttctatgactgtctatacccattttcttttctttctttagcatctaagcacatttttaaactcactataactgttcagaggtattcttgatctggactgctttactaagtgtctgcagctgtgcaattgcaacattctctgacacacgtgagccaaactttaaactgctgagtggtggctaggtcctctgctactagcacatggcctggcagttgactctgcccccttcgggtctgtgactgtagagcctcatgcctgagtgcccagcctggacccagtctatccatcccagcttcagtaagcgcttttacctagtctcctgacagtgatagcatgctgcctgcccacttataaaccccatttaagtgccccatcagagcctcttaaaagagccacacctctgtatgctaagcctacccaagagactgctttcccaagccccatgtggaaatgtgtgcccccatgttatatgccatttgcaaccagtctttctctgtcctacctgccagctcctaaataaccacatggagacttcttattaattacaaatgctctatcgtagcttaggcttgttcctagatagttcttacaacttacactaacccatatcttttaatctatgttcttttacatggctcagttacctttactctgttcttcttctgtgcctgactggggactctgactttcttcttccccaagatctctctgtccccccaccagatgtcccatctagcctctctttgcatagctattggccattcagctctttattaaattgatcacagtgacacatcttcacagagtgtaaaggaatattctgcaatgtagatgtcataccaccgagattagtgagctggttcgcacactgaactcctgcatgtttctctgttgttgactctgttcaccaaggaattcattcactagaagatgtgtgcttgtttgatactggaagttggaagtaatattttaaaagtgacattcatagaccagaatatgactaaactttatttgaagcaaatatcctttcttggactttctcatgaatcatgagtgttctgtgacttgtggttttgttctttctctctctctctctctctctctctctctctctctctctctctctctttctctctctctctcttttaacttttcaacatggcacctaagatttgaagttactcttgattttattcctgtgtgctttttaataatatataaaattagtgttgttatgatgttgagtgaataataagttaatcaaataagtgtagtaacacattgtgtctaacagttgtcctttaggcaatttctagtaagtcactgaaacaaattttattaagtaattcttagatttgtattcatttccactatgcaatctcagatctattgccattagaagtatgttctcatggacgtgtttttgttgttgctgcttttgtttatttgtttgttttttgtagtgtgtacacaaaaataaaaaggtaaagcaaatatggaaaatcctaaatagtgtaagcttgatgccaagctatcctactcagctgcagatctgacaatacaaagaccatttcctcccattttctggaagtctaaaagtcagtggcgacagacagctataattggggcaagaaatttccattttattatagtgactacaatatgcttgactttgcctgtctgattcttggtactatttgactttgcaacttctattttagaacagaaaggaaaaaatttggggggttaaaatgagtactgtgtatctataccacactttctttaactattcaatggattgataacttttagataaatattggggagtataaccaagattgaccatgaaattcctagctaagagaaggatggatgttgttacaatttaataaagaagacatctgggctgtggtggcacatgcctttaatctcaggacttgggaggcagaggcaggcagatctttgagtttaagacgagcctggtctacagagtaagttccaagacagccagagttacacagagaatccctgtctttaaaaatgcaaacacaggcagagaaacagacagagagaagaaagagaaggagcaggacacagagataaaacatcacaaggagttggaaagtagtataatgaccaaagcataactttaattttggacttgtgtctcaatagatcttgtattttaagggactggctttgtttgaactttggactttgcttgacaatgggaaacacttgaaacaaatcaacttaagaacatgaaacatttatcttgtctcacagtttggatgtttcagctcatgcttgaccctgctccccttacctttggtgataaaacacatcaagaaaagagcaggtaatggaagatgcttctcatcttctgatggatgggaagcaaaaagatagatctgaggggacagaggcccaatattccctctgagaccacacctaccatacagaagacatccaaccaaaccttacctcttaaaggtcctactgtcacccttatcctccagacagccccttgggttgaggacaaaccctgttttaaacatagggtttttggggtaggggtcatctatccagagcatataatggcatagagagtccactccaaaatcatacactcattttcatccaatccttccccctcccttagagtccttcattactgagtgttgcactcactgacataagttcttttccctttaatagacctaactacaaatacatgctaactctatctcaactgtgcttatcactgctttcataggctgttttcagtgtcttaaaggttactgacctactgcccaggtacaggattataattctatttgagctgtaaaacaggtagacagccagttgggctttgttatataactgataatgttcctcagagcattcccttgaatataccttattcagaggcagaattaaataaccagatgctgaaatgattaggctgctccataaaaaacatctaaatgtggatgtttctcattaaactaattcaccaaggaaaaggccagagtctataaggaataagaattacaggacatgcatagtttacatctgaaaagttggcatcaattccctgtagccattggcttgaagctagcagacaaaatggatgtcggtcatgctaccattgctaaatagtaagccgatgggtagaagttgttgagctagcaaaggcttgtttaatttcattgaatatagaaagcctaactgtccaatgatatgaactccttcactattggctttggaattcagacttttaagagtggattctaatcatacaatgacaggagacactagtgggataaactcaattctctggtgggtggctgttccacattcttctactagctatgtgcaacatggtttgcacaaggccctgaaaatcatgggcctgcctcaatatccagacaataccttttataaattaaaaaattcccaggattccttggatctttgtaaatatactggagtattcaaactacaattaaaactaacaaggacaagagaaaagaaagaagatgctgatttgtcactaggccagtgtcaagttcatcttggatctaaaggtgccaaaatcctcatggggccctgtgggtgtaatcagactcccctctggatccagccagttccaagtggccatgctgacgtaggtagctggtcttggcagtcagcgtgtctccacaatgagaggattgatgggagcgggcagcacagccatttggctcccctagtcgtttggtgctcaaataaaatctgtaatttcaaattcccagtttgaaaaccagggggtgatcggtcatgtcatgtgagattccaatgagcccctctggtaaagttgacctaagggcaacaagtatcatatgtatcaaaccagagttcacatgaatcctttgctataggttaactcaaatcagaaaatttcactctagcagaagtctcagaaattggcccatttgaagggctcttgtttcacagcagatggatttgcacaggtctctaaatctctaggatacacccaattttatggactttctatcccagagttctttcttcagcccaattctacctgcttctgggagaatgctgttcattaagttgagtgtaactagaatatcacacaaaagtatttaaatttttttcagtcaaagtacaaaatcagttttcccataaattttagagaaaaaaatagtctgaatgtttctattaaagatattctagttctatgtcaacttcatgcttatgaaagataatacctaccgtatgtattctaaatgtttattaattaaatgtgtgtgtgacaacctgaatgtggagggcagacgataccttgcagaagtcagttgtctcctttcaccatgggggtcctggggattgaactcatgatatcaggcttggcagcagtcacctttacatactgatgagtcggctacaccaatcatgaaatattatacaattgaaattggtaacaggtagatatccagcatatctataggaatattttaacacatgagtcctttcttgtccataccccagtcagattcagtttgtaataatgcgctaaaccaggtccagtggtgattttgtattaaagtgcagcaaagagattaatatattctatccaggtggttatgtccatggaccttttatcaaagtagctaatgtccttctttaaaaagaatttgtcacatgatgtaaaaatacctgattaaatcaattcacctgatattgtcgctttttggagaaagtaaagctgtaaagcagaattgtccatgccaactgagtctccttttgaggagggtactgtgaagagtccatgcacagagcagcagcggctcattgcttctatgcatactccaatgaactgggcccaacacatgtcagagatggtcagtgaactgtaagaagccagtggacaggcatccatgtaccttccaggaatctatcaggagccaatcagcaaccaattgggaatagagagagaagtttctattgcatttctagaaaaaccaaaatttagttatgcctgttgatatctgataagctatgcatatttaagaggtataattttggcaaagatcactgagatgaagatactgaatgttgtcatcactccagaagtttcttctggcaactttgtatcctcctgtcacaactcagtgctagaattttgcacaaatggaatcatctagtatgtctgatttctttcacttggggttgttgttttgagattctcttgtgctgctgtacactcacagttcatactcatctaccttgtgtgtgtttatgtatgtacacatgtatatggctgcaagtgtttatgtgtgctggtggcagtcagaggtcagtgtggatgtctttctcaatcactctctaccatgtctgttgagacaggatctctccctgaatctagctggagctcattttggccagcctagctggcagtcaagctccagcgcatcctgctgtctttgccacccagtgctgggatcacaggtttgtgcagcagtgaccagctttattagattgtttctttaaagtagttttctcaagatccaagtcagatcttcgtgcatgcacaagaaacactcaaaactctgctgatggaaatatctcttcagctcatctcattcttcccctgagaaccccagcattgcatgattctatctcagtttctttatcctttcattttctgctggatatctggattgctctacatattatgtagtcaccactgacatagaaataacaatttcctcaaaaaatagtttcctctctcttgattaagtacctggattatatggtaggtgtaggcttaatgtttttaaagattccagaactttccaaagtgctgtgcaactccacatttgtacaatgtcaatcacaaaaatctataataaggaaatatggccaaggtttgaaaaattaggaatggcctcaatttgaaatttttagtttgttaatttgattgtagcaaagataagtgaatgatgatatggtgaaggacattatacacacacacacacacacacacacacacacacacacacacatatatatatatatatatatatatatatatataaaatttatacatatgggagctatggaaacctcttcagtagtactttgtcttgacctttaaaaacataaaaataataacagaaagtgccccaaagccatcttgaaatttcacattcatacatacaataataggggatcccttatccatgcagaataaaatattaacataagataaatataaaaagacaaaaagaagtcaggggccaacagcttcaacagagtcaaaaagtaatttttaatttgggggattgtatataaagaacaaaatctaaacttgtaaatatacaaatggtgaaaaggaagtcagtgttcttgaaggatatcctgtcatgggaaagcagtctcccccagggacaggatttactgtgaatcacataaatgacatctaccaaatctacatgaaatatacctccaagtccagttccctaaagaagaaaagtgcaaactatgcctctgcttacactgtaccttctaatacacggccaaagatcatagtggaatgacattcagtattatagaattacaaccaacagtccttatttctgtagatgtcacagaaaaaaaatgattgtgtgcctatattgcttgtcccctccctgtctctgaagatcatgcaagggacatggtagaactatgagttgtcactaaaattgtcacggggtttctcctttcttctaacaaatcacttcagaaatttcaatactagatacttgtggagatcatgcctctaatatctccttacatgccaaacatccaaaaactacttggtgcctgtcctcttacatgttttattttaaaaggaacattaattgtgaggaatattaaatacattggtgagagatggagaggtaggttaaaaatattttttgcacaaatgatgtcatcaagcacctaagctgttggctaaggtccacatgagtctccttgactaacatcctgggaaactcagacaaaaggtagcaactctatcctatgcttgagttaatagctggacacagaacatttttttccatcctcagctattctgttcttgcccaaatccatttgttatgctgttattatagaatgtattcataccgcaaactctgctaactcaatccctaccctttaatatgcaatagccaactgacagacgtccactcaccatgaacttagcctgaggagcactgtgctctctagttaggagttttcaaattttggaggcacacgacacttgacatgtagggacattaaatttcaaacgttatgcttttaggcatgcacacacatagacaccctgtaatagaacagtcccctcatgtctgcatgggaagttctcaaaggagagccctgtcagatacaagttctttcctctggagacatcggaaatcctgggacattatccaggaccttctcctttggtgtctttcccacagagaaatagtaaactcgtggcgtagattacacctacagtgaaaggagaaactgaacaccaggcagctcctaaaggatcaggtttagagtccgaacaccacctgttactatgggagccataatccccagaagcacaaaatgactgcgtctcagaggaaggacggcttatgagttttcaagtggcctgtcattttttatttcagtcacttcattagggtgggcaggtagacaaacttccagtgccacactcacagatgggtagagttcacagagaaataaagtgttgggccatgtgtttatcgttagcaatctcaacttttctgagtcagcaacaaagcagtgatttcatcatctgccctccctaaatgcacttggccaaccgtcctccctccaaagaatgctggcgcccttgccttgggtaaagaagccttgaattaaccagaagacacacaatatcgaattgagtgttcacacagaagctcactatgcatgtaattagtctttttttttattagtcactcatcttatattttagtcaatcagaaagtggacttacagggtggatggaaccatggatttacctgagattcagatctcaacagaggccaattcagaacttacagcttagagggtctagttggagataagctgcttttctctctaaaatatccattccatttctataagcagagatgctaatatttatgtggaagattgaaaggagtattcactatgtcatacaatccatatcacagtattacattcaactagttcactttagttattgtttgtgcatgcttattttgtgtatgacaaattttgtaaatattctttaagcatctcaaagaattcttttcatgaattcttcttatgggaacattgaaatgaccgattctgggaatattttgtatcatattccgaggaataattctgagctatggtatttaaagatcttaacttttcttctccatgtctaccttttgcctgagcctattgggatgagcaaataaaatgtaatgggacttgcttagaatggtaaacttcagaaagcccgatttggctgttctgtgttcagacttcccacatacagatgttccttcctagtacacccttgtaattagttcattctctcaggtatcacatttgcttcctgtatctaaacccacctgcagggaccctgtgtcatgttcaacaccatgcaatctgtaagggcaatacatgatggtagattgtatagggattatttcttgactagcttcacaaataacctgtctccttctcttctgtctactttttctttcttctctttccttttcttgttgtactggggattaagccacagcaacttgcacgttaggtgagaactccataatggagttattatcccagtccccttccattctttatccgttaattaattttgttattttatggatgaatgattacttgatgatttcatataggcatgtattattttctaatcactctttcctcaccatctatcaattccttccatccgtctgaagctttccccacttcccattccaaccagtcccttttcagactcattttgttaactcctttattctatccaggccatctgtgtttccattggatcaatactgtctactgtagtgtgttggatcgtcaacaggtatataactgaagacaacaattttcccttttccctgcagctataagtagcaaatagttcagcagttagtgatagggttccttgtacctctcctctatctgaacctgccccttttgaacagttttttcttttgtcttgaattcaccttgtagcctaggtattcactgaatttgaactcctcttgcttcagccttcttaataaccatggttataagtttaaccatgaagcctggctgagtcttaccttgaaagagatcatttccacacttcaggaagttgaactctatggagacaatttgtcacatatgattaattaaaaagcaattaatgatgaagggaaaagtagcaaaaagcatgtaacctaaatgatcctaaatagttgaccaaagaccacacacacacacacacacacacacacacacacacacacacacacacacacacacacacacacactattcaggcattagatcaccaggaaatacatcttaaagtagtggaattttagatgagtgttgcagtgaagctgtagggactggatcactgataaatatgtgaaaggagacagacaatggatttggaagaagaaggtatgagtagaacccggtttcccagatttagaaggctaggaaattgcatgaggattttacttcctgctgtgtcattttatgggccaatatagcagcagttgactgagatagggtaggaaagaagaactttaaaaatggtacacagagtactattgtttagaaacttcaattttgggggatctatctattgtcttagtttcctgttattttgcctactgttaggccatgaaaattgttttgtttccctattaataaatcctcattatccagttcattatgtctcttgaccacttcctatactaaggacagtcccagaaagataatcagaatgaattaatcctccctttgaaggagttgacaagttaatgcagaagtccagagacactgagagtaacaatcatacccaagcattatatgtctttcaccacagcaccattaactcaggtaacacaaaagcagacaagcaaaactggggtctgaggccagtcacagtagtgtcgttattcaacacacaaccaatcacagatgaagtagatcaccagttttcttatgagtattctctaaactgggagtgttggtgctctccctaatcccaaaagtgaaagggtaaggtgggtgattcaggagtccaggtcagtgagaacaggactgtgatgtccaaactgatgccaggaaaggaggggttcacaggagtccatgaagctgacaagagacaattaaaacatactttttgctccaggtggggattgctagataggccactgagggtagacacccaggtacataccttttacacacaggcagataacacataggctacatggcggtaggcacacagcacataagcctagaaacacctgtagggaggctggcaaatgcagaggctgtgacctctgccctcaaggccttatttatacagaacccacacaaatgtggcactctttcaggaatagttatacaacatagtacttcgctgtttactctgggggttccctggatatctagtgtctggcattttgtgctgacttaggctcctggatgtcttgcatcagccatgttttagctgactcatatgggacatctacatcagcactgtggtgtgtaaacataaactgtgtccttctggccttccggttccaaatgtaggtcaatgggttttaatgtagaaaaggacaagacatacacagatacagttcaaagttgttcatgtcaagtcattcatagaaaactgtttcatctcaagctttggagttctaccaaataatatccatagtcattatgagaaagagtagattgcaataagtatgtatgaggcagcccagaaaggcctgtttactatgtagtccaggctacccttgaatttattatttagtccaggctggcttcaaacttgatttctctgcagcagtctgccagcattttggactcataatcatgaaccaccttaccttctagtcagctaaaaatggctgattaaggtaattaatgcagggctgcttaaaaatgattaagttacatactaaaatagatttgccaaaatataaaggaacaccattctttataatttttgttgtcactgtttttgaaaatatagctttaacaaaacacgccatgattttattattattttaaaaggaatttgtaaataattcaaattgttttgctttgcaatacaataactatgatagctatgatagacagaaacaagagcttcttgaggtccctaacaggtttttaagagcaaatgaggttctgagagttgcaagtgtgacaggagttaggattagtcaatggaagggtttgggggcaggtagccccccacacttcatttgccccactgctcctctgataaatggaaaccagtatctcaccagtgatgcttggtggagttacaatttgaaatgtctcagacttcccatctgttttcatctgccatcatacttcctttcccacacttggcgttctccttatgtgattcgaatgtcatctccaacttgttcatatttttctggttgcttctttactttttaagattctgttcatacttcatcaaagtttgttttgcacaatttacaggcatattttttttcttcctacaaagctttttctacccagatctccctcagctgccatcctcttcctagatcgatttctaaaaggcagttaatttcgacattcccagatgatggctagagagtccctggctctccctgcagagtctcttacattgggcatccctgttctatggttgtttgcatcctttggtcatgtcccactgacaaagatgagattccacctcattggtctcaaattgcctaagccaatcactgtcacctaccaaacacatgtacattcctcatgcctccttacaccaaaatgttcagatggttgcacgtggcggccagagcttcatgtctgatgttttcccttgatttctttccacctttactttttaaaacagggtctctcagagaacccaaagctcatcaattcagctagctagcttatccattgagatgcagatgtgttctgcccctgtatccaccacccacaaatgctgtagtaaaaggcaagcaccactgtgttggataacttcacatgagttctaatgcttggttagcaaacaccttactaactgagctgttttacctgttcttttgtctctctttttaaaatattcccctttttaaaatgatttattgtcatttaagtgtcttttggaaaagtgatggtgcttttatatatttctattcatttcattgtactttgagtttttcacactccgtgtgtgtgtgtgtgtgtgtgtgtgtgtgtgtgtgtgtgtgtgtgtgtacatgctgtggcataaatatggaaatcagtgattgacttctctccttcaacatgtgggggaacccagggatcaaattaggtcatcaggtttggtggctagcaacaccttttccttgtgagccattccactgcccatattaaccagtttttgttgttatttttaataaaataagcattttattatttgtcttcttcttttgaagattgctgtgcccaattaagaaatcatgtaaaaggcaatcttttccttcattgtttttcttttttatttaaattagaaacaaacttcttttatatgtcaatctcagtttcctctccctcccctgccccccaccaaccccccatcccaaccactttctgctccccagggagggtgaggccttccatgggagatcttcaaagtctgtcatatcatttggagcagggcctagaccctcctcagggtgtctaggctgagggagtatccctctatgtgaaatgggttcccaagtccattcatacactagggttaaatactgatccactaccagaggccccatagattgcccaggcctcctaactgacacccacgttcaggaagtctgtgtcagtcctatgctggtttcccagctgtcaatctggggaccatgagcaactccttgttcaggtcagctgtttctgtaggtttctccagcctggtcttaaccactttgctcatcactcctccctctctgcaactggattccagagttcacctctgtgtttaactgtgggtgtctgtgtctgcttccaccagctactgaatgaaggcactaggatgacatataaggtagtcatcaatctcattattggagaagggcatttaaggtagcctctccactattgcttagattgccagtttgggtcaaccttgtagatctctggacatttccctagtgcaagaattctctttaaacctataatggctccctctataatggtatctcttcttgctctcctctattcttcccctgtctaaatcttcttgtttcctcttttttaaagacacactttgatttatttttcagcaaaaattctagaaattgtcaggtatctcaaagtccataattttcaaggaataagaataagatctcctgagaaaattcggagcaagggaggagggggaagggagctagaagaattagaaggatagaagaggaggggtgaggaggacatgagggagcagaaagggtgagtcgggggaagaatagaagaaaacaagaaaggagataccataatagagggagacattttaagtttaaagagaagtcaggcactagggaaaggtctggagatctacaaagatgacaccaactaacaatctaagcaacagaggagaggctatcttaaatgctcccctgataatgagattgatgactgtcttatatgccatcatatagccttccagcagctggtggaagtagaagcagacaccctcaactaatcactgaactgaactggaatctagttgcagagaagaacgagtggagtgatgggcaaaggggtccagacaaggctggtgaaacccacagaaacagctgacctgaacaatagggagctcttggtccccagactgatagctgggaaaccagcatgggactgatccagaccccaggaacatgggtttcggtgagggacctcctgtggtagttcagtacttatccctagcataggtgtggactttgggagcccaatccacatataagaatattctctgagccaagacacacggggctgggcataggccctatcccaaaggatatgatagactcttatgacccccccccatggaaggcctcatcctccctggggaggagaaaggatatttagcatatttagttgggggggggtggcaggggaggtggggagggagtgggattggcatgtaaaacaatcttgtttctaattcaaataataaaaaaactttaaaaaacaaaaaagaaaaggcaaaattaaaaagcaaacaaacaaaaagaacatttaaaagaattttgttataattcgaccttctttataaccagctgtacacaacttaaaataatatagtaggtagagtcactcaggggtattgggatcttaggacggaaaaataaatggaggttttgataataaatattggttactacccttctcttaccatttgcactacttgaattatatacatcattagaatatcctccactaaaagcacataacttgtaaggtgttgcaaagctaatttttggtatatctttcaaatattaattcaatacataacagtaagaaccacatgctagtgaatcaaaggtggctaaagtatcttggcaattataatctgtcaattctgtgggacttttgaattgacagcagttcttgcatctgttttcaatcctgctcttctccaggaatagttggggttgctcactaatgcattgcgtatgttcagtgtctttttactacaaatattttaaacttccaagtcaccaaaagcctattttacacttatctctctttaatttttttaaattataattttatttaatgtgtatgtgtgttctgcttgcacataagtctgtgtaccatgtgcctgcctgatgtccatggaagccagagggagtgttggatatcctacaaccaatgttgaacatctcctggaattggtgatgtaaactaccatgtaggtgctgggaatcaaacctaggtcttctagaggaacagtcagttctcttaactgtagagccatctctccagccctgcattcacctcttaataagatgtatttatccctattgtgtcatatgcattcaaaatatatgctaggccaacattccctgacatgtgtactcaacactagtcaatgtccagctctcattctgaccccagagacaataagaggacacactgcactcagctacacagagattcctgcttttaactgaatcagctaagagttgacttggtcctaaaatttttaatgtctcataaattgttgactattttaaacaatcacacacattcatttccattgttataaacatagcaaatgctttccagcctcacatttgtatcatggtctgtgtatagggtctcaggtgccttacgcattctcaaatcttacaacaatctagtaccacagatacagaggccaaggcaccaagatgtaaacaagcaaaaacctgctcaaggtcacaagtgaatgagaaaaccaggatttgaactgagctttgtgtgctctcaaattctgcaggtttaaaaaaaaaaaaaaacagtacaaaataatgactcttaggatatggttatgtgtgttaaccgacaatctgtttttaatattagcataactaatggagagaagaagaggaaagtggacagaatatgccagcccaaattcccggagaaggatcaacattataatcattggaacaagataaaaactattaggaatacatggcaaacattggacaaattgtgggatttaaagccctgttctgtttattttgtaactatctgaaacatgcttttttgttctttgacaattcaataatagctgtactctgctgtgtaactgtgtttgtccatgttggcatctcctcatcaaaatgactgcttatgtctgtgtagtgactcacacctataatctcagcacttgaaaggctgagccaggaggattaccttcaacacaaggacagcctgggctacacagtgagatcttgtctcaaaaatgaaaaaataaaccattgcttacttaggcaaattcaacttagtttaataactgccagtactttaaacaaatcgtgtaggatctaccacacacacacacacacacaaaaaaaaaaaaaaaatcagataccactacacctatgtccttgaagaagcttctagagatgaataaagctaaggaatctatcaacttgtggctaataattgaatacatagaagccataactctgcaatctgaaagttaaagaccattaaaacactcttttggtgtttatttagtttatttgataatcacttaggatcctacttttaaaactaggaaagctgaaaaatctgaattggtcttcttctctcctgccctcctctctttttccccttgcctttccccttcctctttcttctccctcttgccccttctctcagcaagtgctgtaccactgagctacagactcagtacttaaaatctgaactttaattttaccttctgaaagcattcaaaataaaataccttttcttcctcaagtccatgaaattctctcacttagttttgaccatttctctgagtcagggaaaaaatctaaattcagatttttagtccatatatcccaattagctgcttgtaatgccctttggagatcatcataagaaacagagaccaaccagtactgcttactgctctgaaatgaacttaaatgaaacttgaggaaaatcaaatggagatgggctattgtacgtttatcagtagttaaaataaaagacacgtggtgttcacgtcctacaagatgtataccgcaatacatttgcttccacaactaagctagatcatggcctcctgtttctctgggttaactagggcacataaatcatttggctgtcacttctttctctttcatccttccttccttccttccttccttccttccttccttccttccttccttcctttcattttgaggggtctatgcatagactgtgttctccatgaagtgcacatgtattattttttatggttctaggattggcaccattttgtatctaaaatattactggcattgtgtgtgtggtgtgtatacatttatgttgattcagttgtcccagtgggcacattagaggccagagatcaatgctaagacatcctcccctattgtttttagagacagggtctctcacagcacctatagcagtttggctcaactggctgttcaagaagcttctgggagcctcctatctcttactacaagaaggatctgaacaaataacctggaatatgatacagtttaggtctcattgatcctctccaacatcaagaaaagttgagtcaagtcttcaatgcacctaagccaggtactggcagtcccatcacctgcagaagctatggactttgctggaaatggcacacaggtgaaccctttagtcagtcagggctggaggctaagtttatccattcataactggtatttacctttcagcttcacttgtttcttcttaatttgtgtatggtgagtcagactgccattctctataaacccatgtagtattttccatggacctttctgatgatgattaagaacacctaactccataaagatgagttgaactgttattcactgagtaatgtgttacttttggaggcatggtctctcagactgtgtctgtgtatgcatctgtgtgtctgtgtgtggtatatacatttgttttctgtttttagaattttttattttcttgtatacaatgaaggacaattggtcttaaaagtatttcctctgccaataaatgtgtgagatcacacactgccttaaacatgtagtgttaatagtttaaactgtgtgaacatgtttatgactgctaattgggaagttgtctaattgagtggggaagctgtcaccttgcttcaacacccttggttcatgttgagttgagaagatttctatgcatttgttaaattggtggcatgagaggggtagtttaaatggagtccttaattggtctaagtaataaaatcctggattcagatatagtggaaaatcttgagagatcagagagaaggagcaagccatcgccacaccatacctccttagcgtctcaacagaaaagagaatgagttcctatttctccctgcttatatcctgtttccacacagctacctcacttcctgtctgtctgcacagacatccagacctctatggttatctagtagcaagctctattccctgaccttcagacaggctttatttatacaagcaagatatgactacagggcaggcattaatgagtctagaaaaacattttttattttatttatttttaattgttttattttaattagaaagaaaattattttacatgtcaatcccaggtccctctccctcctctcctcccctgcccgcccccaactaacaccctatctttctcataccctttctgctccccagggagggtgaggccttccatggggggggtcttcaaagtctgtcatattctttgggacagggcctaggccaacccccttgtgtctaggctcagggagcatccctccatgtgggatgggctcccaaagtccattcctatgctagggataagtactgatccactacaagaggccccatagatttccaaggtctgctcactgacacccacgttcagggcgtctggatcagtcccatgctggtttcccagatatccatctggggaccaagagctctcccttgttcaggtcagctgtttctgtgggttttaccagcctggtatgcacccctttgctcatcagttctccttctctgcaactggatttctgttcagttcaaggtttagctgtgggtgtctgcttctacttccaccagctgctggatgaaggctataggatggcatataaggaagcctctcttctgttgcttagattgttagttggtgtcatctctgtagctttccagacatttcctagtgcccgatttctctttaaacctataatggttccctctattatattatctcttatcttgctgtcttctgttcttctcccaactcaacctccctgtcccgtcatgtctttctcacccctcctcttctccccttctcattctcctagttccctctcccctccccccttgctcccaatttgctcaggagattcttgaccctttccccttctccaggggaccatgtatgtctctcttagggtcctccttgtttactagattctctggcagtgtggattgtaggctggtaatcctttactctatgtctaaaatccacatatgagtatgcaccatatttgtctttttgtgactgggttacctcgctcagaatggtttcttctagttccatccatttacctgtgaactagaaaaacaaatttacgcaacttgattcccagagagtcaactgaatgtatcatttgtcctgcatccttgaaagctgaacacattccacaagcaagaggctggctggctactgaagactagaacctactgtggcttttgcttctgctacgcttgggccaaacccatcgggcctgtgtaactttaacagatgcctgaaaagaccagttgcttccttttgattcaagggtcacattggctcagggccaagaaatctgacacttcaaagcctttgtgatttcagatagacttctgatgccccttggcatcaaagcattctgagaacaggttgcaatgtatgatttcccacacagtctctgtcagaaataccactgcatttcttcctgagaaggtattttgctggtacttagggcaggaaatgcaaaagacagggaaggcatgcttaaataagcttaagaatacttacatagataaattgtgggcaccggctactattaatcgtcatggcaacccacagagcagaagagatgagcaacagaaaaggatttttttcatgtcctgccaccttacacaagcactttttcaagaccatcatgaggtgaactccccacatcaaataggatgagggctgtgtcattgttctgtatttataagctgaatctaagatcagaaagtagcgggggtcttgcaccatattgcctcttggcagcagagctttctgacaagacccattcccctgacactgcacccaaatcagcctttatacatagaaaacatatatatgtttttgaatgaaggctcttagaatctggaaaggaacagaaagaagcccctagaagcttgcttgcttacgctagctgctaacaggaaacagaagattaaattctatctcttatcacagccccttcttccctaagatcctaatgttaggcctacaagaaaaaaatctatagtcactactgaactttttctggttaaaatatgaagataaaaagacatacatgagaggtgccatagtacaagggagagtacgggtttgctgatttagattgttcattaccattgcccaattccttgacttttgtgaagtgacagcttctctgatccgtaagatctgaaagacagtaacataacccacgatccttggtgcaagaaacagctttctgcagttttcctttttctccattattaattcaatggctacttgccttcaatgccttcacctactctattcatttttaaatagggaataagaaaataaatcattgtttgtaaacctaatgcattttttacttttatttatgcttatattttaagtattcatttaaaaacaatatcacaaagacatattttttcgggaaaggtgatgttcagcaaacatcagctcattccatctcatggcaggaagttaattcttgcaatcatttcatctctcgagaaccagtgtttcatcttactttgaacccgagtggaaagcatccaaataaaaagtttcttccaaaactaaagaagactctgtgcttggattagctccacagaaagcatacagaagacaagaaatgagcccaatttcagcagacaacagaataaatcaaattaaagagcacccagaaatgctcagcccatcagaaaacacttgtagtgggttcctttgtcctcaagagagttttgttttctccaaaattattgttgcatttaaactctgtttccattctagttgatcaccatggctctgttgtagcaatcacaatgtattcaaatatatcaaggatataatttaaacaatattgactgtaactgcttgaaactatacacttattgcataccttggcatagtatcttctttggactcagatccctacctatatgtgataaaaactaccttgaatctgtcaacttgtaacaaaagtatctttaagatcttttgtgtcaacccagaagataactcttcagtggaaatgtggacaaggtgaagctgatatggagcagaagtgtcaggagccaactgctgaagatatttcagaaagactgcttccaactccactgttaggtccagaacaatccttaggcactttttagtagatggtacattttgttctctcccccttctcagtgatctctaagaccaccctcaagaactctcgccacaccactccctatcctaaggcccatcctcagccacccagtcttgagtggtgctgcagaaatgtaggaagctgtgctatggctttctttgcagatgaataatttatgagttcatcatgtttctatttgtctcaattattattcatcttgttcccaaagtcagttctgagtagttgtagccattagatggtgacactcttttctgcaaatggaaagctggaacttccttcccttgttatctttgcatctcttcatctccaggcatgcctcagcacatttatgcatctcttttccattgcatgaggaacctgtacctcctcccatccaaagataaggcctttctgtctcttctcttgaattatacttttctgatgtgtgtgtgtgtgtgcgtgtgtgtgtgtgtgtgtgtgtgtgtgtgtgtatgtaaaatctgcccaaccatttataaatgaaaatatcaaataagtaatgtaaaaaataaaaaattaagccttcaaattcttcattttctctccatgtctattgccttctattggcagttttcacatgctattctacatcaccacattgcaagtgcactaagaacaagttacctaggtgtacagtctgtgagatgctgtgttaaagtcataagcatcatggcaggtatctatctacctggtaataatcctttcttataatcaagtaagtattttaccaaggatagtgtcaacaatatattccaatacatttgtaaatctgtcccaccccccaaaaaaaacaaaaacaaaaaataaagcagggcattggtttcgaatgcctttaatcccagcactcggtaggcagaggcaggcagatctctgtgagttcgaggccagcctggtctccagagcgagtgccaggataggctccaaagctacacagagaaaccctgtctcgaactccccctccaaaaaaaaatctgtaaatctgaaaaaaaataaacacttgggaacagacaaaagcagtatatattgcaagtttcgccattattaaagtctctggtgaattcaggtaaatctaacaattactcatacatagatgattatgtataaaaccccatggtaggtactatggaagaggcaatgatgagtaaaacaacagaatttccttaagaaattatgatgttagcatgccacatgtctgctggcatcgtgcacagctaggcacaagtggagttaattgcataatacacatgaataggcatcaaattctatttagaggaattggaggcatctgtgaaggaattgcagaaaaccctaacattggtcgagtgactggttctgtattctgtgatcattattgtggcttagagcaataaccggttaataagcatcatctggctaattaaacaactgtttttttttctgttgagctttatgctatagtggagacataatttgtaatcagaatttatttttatgaaattggttgatgtggaggacctcagttttgaattttgagaattgcacaatttttcagaggcttgagagaataggaaagaatccagggtcctgacactttagttgtgtgcatgaatgtagatcacatgacacagaactgtgtaggaagcaggaatagactctgaggatcacaaagcaaacacaagtgaaggtttatgggtggctttgagatggtgaaaatgtaggaatgtggtcatcttccttctaataacaaagaccacactgcctgagactagggggtatttttggccacagttagaacatgtcaaatatatgaatcaccctagtcttgcttccataaatagacaatatcacagctttcagagtctagcattttcacattatgtacagtatttcccttatgtattaaatttcataacccatgtcaagcctataaaccagttttgaaatgtaattacatagccacccctgtgaaaagccaatagcaaggtgggttcatcagcctaagtttcccttgatgacatagtttatgcttggatcatgcatgttttttgaaaatggattttgttcttaaaaataccatgaattttatgcgatggctgctgggctcattagcaagcatatttgatgatacactaaacccgtttgttctccttggctctagaataatggtaaagtaagatggctgggtctagcctgaagtaattcaagatggctcagaggtaatggctcctgcattggagccaaataatctgagttccatacctggaacctataggatggacagaaagaacaaacttcccaaagttgtcctctgacctctacacaggagctattgtacctgtgcaacaccccatacacacatcatatatacagaataattaacaaatattttaagataaaatgcttctgaaaatgggaaggaaaccagactaacattttaagggtcctcatggaatgactgacttcttccttggcccataggaaccatataggaagggcagtaggcagatacacaaagttttgatgggatctcacagaatttgtaaaagtaaaaaatcattttctctcctagaaaatttaaataagttcgtaatgacttccactggatagtttactttaactgatatcaaaagatttaaaactaaagctattgagattccctccccccaatgtctttgttctatgtaacaaacataaacaaagctttattggagattagcccggtttggaattttaggacaacaatcagaggattccaatgctgtcaaatctgagtggaaaatatccaaagaataatctgacatcataagaaaaaaaattcattcatttttaaaagttgttatggagtggcaagcagtactgaaactgtctgcattttgagcgcacaatctcacccagaagaaaacaacagggtatcaatacaaaattctttctcccagagaaagtagaattgtgggtgacaggaaatggcaaagacagtcaaaggttactgtcaactgtgtgacagcccaacctaggattgtaggcgcaaatggaccctgggccgactataatctttacctgaacagttccctcagacttaggaagatttagcaaaacttaagtcatctccttatccttcttgagaaaacacagggcatcaaaacgtgtaatgatggcatgaaccagtggttctatctactaaagtggactggggcaggaggattgttttagtctaagagttttctgggtaacagtgaaaaccggtctcaaattaaaacaaaaataaaatgcagctgtacacacacaaacatgcatacacacaccaccactagaacagagtttgtgacatgactcagtaggtgagggtgcctgctgccaaatcttacaatctgagtcaggtccctggaagccacatgatgcaagcagagaagcaactcctgtaaagtgccctcttacctccacacatactccaagcacatgggtgtcctgtcaaaacaaagggataaataaataaatgaaaagtttctaagccaccagaacaaacaaacagaaatatactgtatccgttcatctcagacccagcttgacaccaaagagaataatcttcactatgtacactttgtaaagagtaaataagaaataaattcataccaccaataaaaagccttaggaattctggctcaccaaaagttcaaccaaactggaaagtagatctttcaagagacacataattgaagcagacaggagtaagacgaaaggagccagcatagcttagaaaaccaacctactttgagtgtgcaaaagtggtggagagaacacaagcagaggaggagtaggaagtaagcagcacagacgctggaggacttggcaaaagggatcagccccaggacaagccctttcagggcttcagacactcccaatgttcccaaggctttggcatgtagaaccgaaaagacattgccaactgaggaggactagccttgcccggaggcctttcagtgttctgtgtccatgcaggggcccctctgtctagtctgaagtcaaggccattatagagcatctctgtactttcccactcaggcttttagaaagcgtgaatgaccaccctgctcttgctcaatgtccttccatccaaggaacatttcaaaaggctttatagccaacatgctacatttctcctggtgttctcaccacaaataaacgtttgccagcaataccacgcaagcctttgctttgttgttgttttcactaaataggcctcactataatagtgataggacagagaagttcttcctggggtatccaagaacatccattacctggcaactagacactcgcccttccctcctgactgtctactttgaagaagtccccatgttttctcgatttacttattatctaatgggttatttgctgctgatgctgtagatgccagtctttctggaacacagcttccaaacagacaacttgaagctagcacgctctccagcaagcatcccattcacaggcaaatcttccggttcctttttactgactttcttggttattggtgttcctcactccttctcatttggctggcatcgaaggactaatgatttccctgccccctccaagaaaagaagcactttaaatgcaataagttagtctagacaaagaaaattaaagtcattagtagaaaacttgcaaatgtgccgtgtgggaggggccccgtcattacagacccttgcccaggctcctgtggtttgctgtgtgtacaggacgatagttctgcctttcctctctggagaggagaatcaaataatagtgggtttcaattatagacataactgcaagttagtcaggggcataagaacagggtggctgtcagctatgcctagctaatgtcatacgacatgaaatcctagcacataacaagggatcctgaggcatcctcattaccacagccctcacagtcaataagacaccaagactagcaattaggatgcagacagaacaaatatttacattttgagaaaacaagaggggaggcatccacagcagaatgaatcaaaagccacaaggtctcagatgtgggcaggcaaagtgttgctgtcagtgtgaagcaggaaggcaaaaggggtttccagtatttgcaattcagggagctagattactggaaaatttacggaaacattgaagtttaagatcccctccatctctagtagccttgcaccgagtttacattagaagccaagcattcttctcccccttctatccttaccacacaggtctgtggattctgaagacagaacctaaagacaggttctcaagtgtttcagagtcctgaaaatcaatcaggcagatgtttaaaagtatatatcaatccacacattcatcattaaggagctcagtgtggatgaacagaggctgtcttaaatctgataacagaagtaaataattacagcagggtgtgtctgaagagagaggtggggctcttctctcaaagtacaatagatctctctctctctctctctctctccctctctctctctctctccattaaatgctttagggtgactcattcctacaagctcagaaaacagaacagaagtataacaaaaatcccagatgttcagacatatatgaaagagactggaagacctctggcaaaccattgtgaacagctgaggtgttccggttgcccacatgtgtgtggactgctcacatgtatgcaagtgcatgtgtggggtgcatgtggagaacagagacagatatcggacctattcttcagtcactgtccacattattattttctcttttgagaacggcttttttatgcaaccgagaggtcactatttccacttttcttagcctgactggccagctagccttagggcatcctcctgtctctgtgtacccaagactgtgatcataggcatgtgttgatgtacccatgcttttttttagaattttgtttattaatcatatgttgtgggttctggagaatcaaacatagggaattataactgtgtagaaaacactttactaacagagccatctccccagtgcatggtgtttggtttgatcaatgtaggatgcatcaggctgtcataagaaagtcaaagagggtggtaaataaatacataatggcgggaggctgagaatgaaggtgagcgctcagtgcacatagattggctataatgtggccagtgaggtgaggctttcctccttccaatatctctgattctgaagttaaatacaagctggtgtcccccaccctacactccttttaaatctacaccagcctttaatggacttctgccatgcacttggaattggtattggggaggatgacttgggctgcccatggtttgatagtgttgtttaatttctataatacagtatctaaaattgttcctttgagagatgtttcaaagtacttttagctcagttcatttagttttaagtgcattttaaaaagagatgtgcatatacaggaccttgacccatttgatattttgccaatggttaaccctgtgtctgacaaacactcttcttaaatatttaatctttactacaaattcaggtagagaaaaaaataatgaggcatctgaggacatagcatatttgataaaacacttggtctagtatactctaaagctctgggcttcatcctcactaccacatgaaaagggtatgatagtaaaggcctgtaatcccagcacgggggaggtaccagaaggaggatgagacactcaaggtcatctttggctacatagcacgttctacaccagtcagcattggctacatgagaccttgtctcataagcaaactaagaaaatctgctaggtgaatccacagccctttaaatctaattccaaatgtgctaaagataaggaagggagcctgaacccctttcacctattgtgggtgacactgctgctgcgtaagactctaaagagaaacacgctcaagaggacaagaggcaacacagagctactcgctatttaagaggttcatccaaccaagtctcctaaaccttttaggggattgtcaagtgaccagaacaaagaatgtcttaacagacaattctggaccttgtgcctcttcctactggttggctttcactgctttgaaatccattctttcaaacatataaaacattttgaggctgagtgattatttgggtttaatagagcaaagtcctgccttctatagggaattattttggggttcagtgtctgaaggaaaattctgtaaacccccatgagagttgtcgcatgagtgatggtgagtgtcataggggacctgtgtgattgttgttttctaggttcatgatgaagaaacaaagcctaactgtcgacaggacttactgaaccccttctgctgatttgcatttgttttctttttggtagtttcatgcatacatagcttgtgttgggattatattcacccctattgtcttctgtcattccccttcttttcactctggaccccttctttgcaactagtccccaggagctacaatgttcaaactgtcacctggccctgcagcaaccatgaccagtgaacagctccccaggaaggggtgaagcattgtgggtacttcctctatgcaggatggaatgctagaggtcaatcatttggtgaggccttattccttttcccttccaccagagttatttcctatccactccacgtctcacactctcatcccttgcactggaagatcatttttcttctgtgttttctgaggagatgcctttagagggcagatggtctacccagacataaatcccctcagctctacagtgtctcctatcaccacttttctcctcatttgccatttcataggacaagatagctaatcttgtccagtgtgctctttatttcttccatttcatgtttccccctaatttccctctttgtttcttccttttttgttcttccatccttcctctcaataatttacatatattcaggcagttcccattttacactctaaaatgtaaataatggaaggatggaaagaatgaaagaggaaggctatggaggaagactgcagcctctgaggtctgtctctgctaggggaaaacactgtgtctcttttctctcccactgctttcccatggtatagttaaatctgctgggactgtgctatctgagttgtatgccttgtcttctcattctgctgagtactgtgtgtgtgtgtgtgtgtgtgtgtgtgtgtgtgtgtgtgtgtgtgtaagtgtgcactagccaatatatgtgcaggtggaggtgggagattgaagtcaggtgtcttctatcaacctccatgctattattaattctttgagacagagtctcccactaaacctagagctctctagttggctagagtccttggccaatgagctcttgggatcctcctgtctccatcttgtctgggattatagccacctctgatgccagattttgggtattaagggtttggaattcaggtcctcatgtctgcacaacaagcactttacctgaagtgttgtctccctctttggtcttccttctaaacaccttcacctccattgaaagtttattaccctctgcttagaccacatatcagctttctccaagctcgatgtttgctcctgttaagcctcttcgaacacctgagaaaccttatctccaggtgcatagctgcagatggcttccagatctgctgccctagtcaatattttctcagtcttcgatactcccaacatgtcttatttcacaccctaggaaacgataaaccaactttcccagattgagaaatgaaattgctcacccctgaccatagctatttagaaatgcagtcttccatcccagcgcattctctctgcagtcaaagacaaattaacctttggccaacttagggccagcccatccatccgtgcactagatgggtattccttcttttctgctccctgtacaattggcttcaggtttgcttatgtgctttatcgcctatgggttaagcctcgtgcttcttggtaagtttttcacccttagctctaaaactatactcaaataagcctctattctaataaattaagtgaataaataataaattctatctcatgagccattgtccttgcaaccactattgttgatgttgatacctgatctttttttcttccccttttaatcaatttactcaaaatatcctacatgggcctccagttccttgcatcctgatgagtcatcatttaatttttgtggcatttgccagagtgaagttactctgacaaagccccttcaccccttgattgctgctaaagtcaaagaattcagaccaaccttcatctggactcacttggcaacagctagcatttggggcaccactttcttcaataatttcttactctctgtttccactgcagcctctattctttttatgtagaagcccctgggcaaattcttttccctcctgcatttattttttagctatttatcattctttggtttctcaaagatgacattcctgtcccttttgtatcttcattcttattttcattttataatcactcctttttaaatttttcatgctttacaaactcaaagaaaagttatatttcagtatcaaaaatagcaacgatatcaataaaaacctggtttcaaatttgtctacatccagagaagaaacctgagttggaatcccacctcttatcctcactttaccagctatatgatgatgggtaaatcgcatgatcatcttattattatttacaacttctataaaggcaaatttcatttccactcagaatgcagtcatgggagtaggtggagctactaggtacactaatgtcgaatatccatcagttgatgcctgcatactgtaagtgcttacaataataaatttaatcattagttttcctaataccaaagtctatcatcttcagcagggttccttccctggcattcagcatgatataactacaagaggtctccagaggttcagatacaaagaaatatatcttctcatccttcatctccatacccactcatcactgacttactttctgtgatcctaagcatttggcttttataagttccctagacacaaaggatctactattctaaacctatctctgtaccagcccccacctatctgccagtgcctgttcagcctctcattttctctcacttagatgatcgagttggactcctctctactctctttccctccatttccacttgtattgcactcttggagtcactcttggagaaagacccttcagaagcctttcatgatcacatgacatccatgctgctgagaatgacatacgaaaattttccacaatgaactctctgcctttctcttaatgtgtcaaatgaaaatgacttttgtttccaaacatgggcgcttttataccccatctctgttcttgctgtcttctccccaaactgcctcacacttcatgtcctgatttgtctatcagctttgcctctttcctcacccatcataagcctgggcttattgtcactgtcacaaaccccaggcatgattgttttgatgaactgtccgaatttaataaaatctactgttatagatacaacaacatttcttaaacatacatattattcaaaccagctcttatctggcttatgtaggaatatttctctacctgaaagaacttcataggcaacccaagaatgacatgttccaaattaaagggagccttcctgcaaacaggctggtctctctctaggctggctttccaagaatggacatagtcaccatccactgtgccagtcttgtcagtgagactagaagcacagccaatcatttaccttccttcctacttccgggatttgttcatcccccagcccttttctatctgcctgtgtaccctcacagctcacacatcccagttacttctctgtagaacaacagttggctctttctttgagcttttgggaggaacctgattttactggagtggatcccaatcttttttcctacttgtagaaagaaccatctaccctctgccttagtggtacctccttactgctacaaaattttatgtttaaaagttttaaaagactctttaaattcatcagggtagtgtttacctttggagtgagacactgagggcttcccaattactgagttttccagttttatttatttccatgtgtctgccatacaccctgtccttcagctatgaatacctcttctcagtcattaaaccattcagtgccctaatctctaatgttatatataaaataatattatggacacatgttggaattaactgcctcttctcattgcactaaattattttctctttcctagtcttttcacaactagcttttgtgattgagatttatttttatttccttaatgtttgttcacacatccccttctccacacccaaggcatacttgtcttaacatttcacactgctttttggcattatcactattgttttgtattacaatgttattcctccataatactcaaagttctttctggatataatgaatattgttatgttcactgtaccataatacatgacagaatctgctgtcaaaatgaattgctattgattaaatacatgaatacgaatgaagtcaaaattaaatgttttgaaatgtgtaaaggaaaccaatggattcttcagagagaaatgttacaggcagcaactacacaggaagttctaagcataactgaagagaacagagagcctggatttgactctgaccttagtcatacattagctatcctgtagtagaacttcccttaactgtccttccttaattctactatatagtgtataaattggtgacaaagatgatgacaattatgggtgataatgattatttccaggtataattccttcatagaccaattaatataaattatgtatagcatttgacattgattgtccttggtaaagatatattattattctctcatcttgtggtctgtcagattgctttaattattataaaaatgaaaataaattgtatagctttggctaatttcatgaaacatcacttaagatgtacagacctgtagaggtgaagtgacaattaaaatcatttaactcaagcccctcgaattttcataggaaagtgtcatctacattgttcaagatagagtcacatagttaattaaaagttagttggtaatgatctaaggccagaacaaaactatctcccatgacttctatttccagtcacttgaattgcagaaacagtgtggcaactgaattttaaggacaagcatagccatagtttttcgtctatgtcgggaaacaggcagagaccatgtgtgtgcagactaagccttgccacataaccacaccaactatactattctttttcttaatttctcttgttttggaggtttttcttttctaaagaaaggagaaaatggctcaatggaaagttatgaaatactattacattcaaatctgattaaaattacagtgactgtaaaccctgagttgaggcagacacactccctagggctggcatgtagctctgatcatgttaaatctcgccatttatgtctagcttcaactatgttgtcattcccctagtaagtgatattccaagaaaatcaatttttagttatattgcctatttgttcaagttccaccagcaggttagaataaagaaatctccataaacagaggtagagacagttatgagaacacgatctcaaactatcagtttgtgccaaaaagggaaagaaaaaaaaacactataaggatgaggatattttttcctcttatgggaatccaaacaagagtttctaaatgaatctttcttggtttgagggagttttttttttttttaattccatgagtttcttggtcagaagttcaattatcccagtaatttgtcactaaatctgattgaagacttaacaaaacacaacaaacccttaataacccgggctcccagatgtctgtcataatttcagagtttatgggattgtctattttttgctctgaagtttctttaaaacagtaagagtcagggcattcccatttcactattgttctccagcatctgcccattagatggtgagtgattctgcagactggactagttcctgttctttatgtacaagggaaaagaatacaatagcaaggctggcattttaaaagccagagagggcccggtgttggtggcgcatgcctttaatcccagcacttgggaggcagaggcaggcggatctctgtgagttcgaggccagcctggtctccagagagagtgccaggataggttccaaagctacacagagaaaccctgtcttgaaaaacaaaacaaacaaacaaacaaaaaagccaaagagttggcacagaggttaagaacacttgatggtctagtagaggaccaaagttcagttcctagcacccaagtcaagtggctcacaattgactataactccagctctaggggatctgttcctttcttctggcctttgcaggaactggcatgcatgtacacataagtctcctcccccgacacacacaaataataaaataaatctcagaaaccaaaagcctagtatttgactatttgacttggagatgtttacacacagattctgggaagaatctccaggctttttggtaatcagcatcgcatcatgatacaccatggatcatcctattttctaagagtcacatcatgggagattgtgctatgtcagtatggttagtgatgaaaactatcaatagaaactgagcagtgtgtgacttgaactgtacccttcctccacaacagtgtttgagtccctttcttctcataaatgccacgtgtgatccttctgatcttttatgccattatttttttttttaaaaaagagtcagatattttaaagagcagcatcaaaagctaagtgcatagaaaatacttgtaggatatcttgctctttgtgtgaatggaagattatcaggaatttagagcaggaaagagtcttcgaaatcatcctgtctagccagtcccttgatgacaatactggtgtttcccattgtctgagaactcaggaaatcctgcacaatataactctcttttagagactcacatatcacattagtcacacttatgtcttccagaaagggagtctcagtagctctatttaacatgggctgacttaatttatttgatcgccgacagcttttatggagccaacatgcagacattcatatcataggaagcactgagctagtctctttccttaaaaatctttggtctccatgagcttgtcaaatgatcaatgacttctaaaattagaaacctgttttattttaggatcaatttcagatttgccattccatgcatggaaatgtgagttagtctttaaggattatttttgtcgtgagatatctgtgccaggggtcaaggagtgaaaattagagccacctctgggtctgcttgtgaaatgattgttcttgcaccagtggcaatgtcagtgtgagtgtccttgaggtaatgcacacaaagctgggaaaagcccctaagagggctcaaaggcccaccccacataataaggaaaggcactataaaaacctgggctgtctgagagtataagccaactcatgtaagtaacacacatcactagcagttttctcaaagatttatttgcagaattttctgatagttctaggattttgtaaatagcagtgttttgaacagattaagttgtttctgttatataaacatgccatacataaactcatgatggcaactctctatatagctgagataatccgagacaataacagatcaatagagccattcttctggaagcgacttcccaatagatcggttctgtcatgagggcaatgggaagaaaaatgtgacaaatttgttattttagtatatgagccatttttttctgtgctcattgtggttccaaatttctaatcgtttgttataatttcataaaactgttgctgaaaatatgcaattaccaaattagcaaacttttttgttttaaaaaagtggagctgggggtagaactcagtggttacagcaccttatatgctaagtgtctcagttggattctatcaaaagaaaggaaggaaggaagagagaaagaaaaaagaaagaggaaaggagggaggggaagggggtggaaggaaggaaggaaggaaggaaggaaggaagaaaggaaggaaggaaggaagaatggaaggaaggaaggaaggaagaattctcatctccattttcttcatcatagggaatgttttgttgcttgtttgtcagtctgaagtcaatccagtgactcaaatgaatccagcataagactctggatgaattgccttggcatcactagtaccagcttcatgaatctccttctttatcctctcagcctcacctgaaagccttacagaaatcttcctccccaatacgctttatacaaactgaatgaaggcagtaagtgtgatgccatcctgagaaatggccagatcaaaaaggaaagtcaatccaacagttctagtcatattttaccttagggtaacactggctgctgaacatagggattcatcagctgttcccctcaagaaaaccccaagagccccttcacgaagaagcaggagaaagaaatggaaaataattcaggttaaatgattctccttgaagtggctttggcaaagcttggtgctgagtctgaggctctacttggattgaaagagctgttctaagactagagtcgtaaaacctcagcaggcagcctgttgatcatttctctggcaaggccttgatagagaaggaagtgacttgccagaacactcggacctatgctgaggggtcagagacacattttcaagtgaaagtttacttcagccactcactgaacagaccaagataaatgcttggtactgattacttaggtttttttttttttaatggattagttgagtgtagctgttgtggggctttcaggtttacacaaggaaaagaaacacatatccattccctagaatatttcaatttcaattcatctttcttcttgtggtcaataatgtttctaacgtattaagattggaggcaggtaagtacagaataactgggtgattagagcatgctaatttaaagagaacagttgaccatctaacttatgaaagttacaaagcagaaatttcaaattcttatgagaaatctcataacctagttccttagtcaaatctgatattcaggtacacatttcaataaaagtcaatctcccataagtctctctctccttgaataaaacaaaggaataaaagccttccctgtaagagttaattgaaatttcaggtacttagcattgagcaatggttcttataagtacatttttaccccaatttgtgatcatctttctgaaaatcactcgtaagcttatctgtcttattctttcaactttctttacctccatatttccctgatggtaaggaaccaggcaagtgtggccacagtgatttctaccatttcacatagtgtacatcaaagttaaaggggtagaattttgacagtttgacatttgagttttgtctctacagtctagtgaccacatggttctagccatgcaattatggccttcatgtgttcatctacagacgatggtagacagaaacaaaagaattattttctcctttggtcgtcctattcgtaagcgtgcgtacgcacgtgtgtgtgtgtgtgtgtgtgtgtgtgtgtgtgtgtgtgtgtgtgtgtgtgtgtttataactggagtattcattaaaaatatttcaaaaccagagacactaaattaatattaatctactataattatacaccattgttttggtcatgtgcatgcagcattagttttgagacttacagtgggcattataaattccttcaaattcaaaatagaggtgtaggaaaacaactgggcatcttatttaaactattgtaattatgtcccctttcccctaatacaaggcaggggcatttggggctgaggagtggctcgcatagaggtctgaattcagatctctggaacccacataaactgtacctggttttgagtatatatgtaatgtcagttgcccaatagtgagatggaaagcagagataggataattccccagaagctcccaggcaactcacctggcaaatctgatgatgaacaagagactttgtcgcaaacaagtaagcaactagcttacctgttctggcactgagatgctaggcccttggccaacttcttaggtgaaattagatatcgcacacccacacacacacacccacacacacacacccacccccccacacacacacacccacacacacacacacacacacacacacacacacacacacacacacaaacacaaacacacacacacaaacacgtatgagagagagagagaaagggagagagagagaaagacagagaaagacagagacagagacagagagacagagacagagggagacagagagagcaagatccacagatggcatttcacattgtacttctgagataagtgaaagggttacacaacaggttcagaacagaactgaccaacaagttatgggtacagacagtgacatggaagatgtaccctttccctcaagtggatgtcccttcatttccctgctcaacagctcttttttctgcttatggtcctttatttcacaaccattgctccagtgtggatcttgaggagtgcatttagtaagtattgcttagctagtggaatatcagctaatagggttaaaaggtaacaagatagctgaccccatggcagaagctcggatttctctccagccagcgcatgctaagccatctcttcatatgcctggagaagcagtttagaaatgcacttttaactggcagcatcctccttcctcccctaactgcaaatacggtagggctttctctagagcacactctttttgactagcaagagaacaaagtacatctttctattagatgctattgaaggcatgtccacataagcagagacttggaatctcctcaaagacagacaggagccagagagcgcctggtagatcagtaatagaatatttaaatcaaagttcttcttgggaggggtccaagtgagagaagaagtaggagtaaccagatcctgaccatggcattgagagcagcagctgtgctgagggctgtttggagtgcttgactgcacagcccaacaaaccagggagagcacagctttaaatgcctgttggattagtgataaagacagagtggagactcgattgctttgatttctacagaaattagcacattaaagtcaggtgctatttgcaagaaaggccttagttttgacaaaataattagccccaaacctctcatgtatctcatgtatctactgttatgatgtggttataaaatataacttccactttctcattgttaataccttaccttttgggtcccagggcacattagagaagtgtggtagacaaaacatgcccctccaaagatgtccacaccctgatacctgaaaactctgcatatattaccttaagcggcaaacttgattttgcagttgtgattaagttagactttgagttgggatagtagtctaaatactgcaggtgaatcagatatatactcatgggtcctttaaggagagtaaattttccggttgtggtcagaaggaaatgtggcagtacaataatagtctttctgtatcacctcttaaaaaatccacttgagcagggcatagtggtgtattcctggagtctcagcatttggaaggtagaagcagcaggattaagatctgagggcagcctagggtattgaatgagaacacatccaaggtgtgtgtgtgtgtgtgtgtgtgtgtgtgtgtgtgtgtgtgtgtgtgtagatagatagatagatagatagatagatagatagatagaataattccaagaaaagggagagaaaagaattttaatataaagacagatttaactaaaagaacaggcagaaggttttcttactgttttggtttagaaaatggagctagagagccaagagcaaacagtatgagcagtcatcagaagctacaaaggcaaggaaatgcattcccttggaaggtcacagctctgttgaacaccttggagttagctcagtgagaccaatgctagacctctaacacagaggactctaacatcatctatccatttgtgctgtgatcagtgagaaaacttgtagtcattagctatggcatgaacaggaagtaaaagcagtaggaattagaagcaaagcccttgctacagccattcactagaatactccttccaggtcccaggcttaaagctaggtgagtctcaagaaccacattggggcatgtagctctctctccagtggaaagactacagagagaaggaaagaactacaggccctcatccaacacatcctgtattatctcaccatcactgtagcaaatgcatgacataagcaagtggaaagaagaaatggcttagcttgggatcacagctccaaactaatcagttcatggtcacttggtcctgtcactttggggctgtgatgaggcagctcatcagagcatggagagcatggcagagcaaagttgtgtattttgtggtgattgggagggaaggaagagaagatgctagagtcccagtgttacctttaaggatacaatcccagtgacctaacctcctcaatgttctatcatgtcccaacaaggccacagttgaagaacaatccttcaactcacagcctttgatgaagactaaagttaaaaagcgtaacactcttagatggaaatttagcttcagtacagttgtgttccagatatgtctaaatgtttgaaactgtgacacagtattgtttgtcctccacaaatttcacactttggaattgtacaactgaataacaacaaaataatactacaaaaaatcccataaagatttaagtaagtttatgattttctgttgtgcctgggtatggtaggacataaggggcccatagacaacaatgtgggcacatttaaacacaatcttgatggagacaatcatggcaacacttctggccaggtatgtacttggaaacatgcagaaaattgaccagaatattatattaaagggagaaggaagagtagagaaggagtcctagtcattcatagcccatgcctgcaatgtggatgaagttcttgaaaaagcagagacaggtaagactcagaacaattatgtgaaagaaccaagatcctagtgtctttggcagctgagaggaagtgagaccaggaccacctgaccagagcctagcgactccatgcacctctgagccaatctagtggatcaaccccatcactccaatggcatacacttgaggctactagggactcatggtgaatcagctgagacactgctggcatgtctatttggggcttgaaattagttcagaagagagtggggacagggggggggcgacaaaggtccaacagacagatcaactagaagtaaacacctttcaatcctgtatgacttttttcatgcatgtcatactgggaaagtcctttcccacaaagaggtgattatattgcttctgtagtttcttttgacactattcatttttaactaaatcttgtgtctatggggaagtatattggtattatatgaaccactctgtattttaaatttgacttatttttcggttgttttttgtttgtttgtttgtttggttggtttggtttggtttttcgagacagggtttctctgtggctttggagcctgacctggaactagctcttgtagaccaggctggccttgaactcactgagatctgcctgtctctgcctcacaagtgctgggattaaaggcttgtgccaccactggccggcttacaattgacttctgatatattccaatactactggtcatgcagtctataatgccaaacacagcttcatacattctcaagtgtactatgtttttttttctgaattctctgtgttccatcagtaaatcaaaagacaaacattgaactagattgcaaaaaatgaattgtaggctaaagaggtgactcagtgggctaaacacttgctgtgtaagcatgaacaccagggttcagatccccagcacccatgaaaacgtcaggtatgtaaggtggcacaccttcaatccttgtgctcaggagaaagtcacaggggatcctcagggcaagctggctactaaagctagtcaaacaagcaagctctgggttcaagtgagaggtcttgcttcaatatataaggtggaaagcaattaatgaacatatgtgacatcagtctgtggccttggaatgaatgcacaggtacctgaatatttacttgcaaacacacatctacctacacatacggaactcatacacacacatgaataccacatacacatgcaaagccaaaagaaaaactgtaaaatcatgccatatttaaagagcctaatatgtaattaactctgaaaagttaattataagcagatacttcataaagaaacacacaactagatcttataggaaaaactctgtccacatgacaatggaagtctagagaacactgaaacaacatgcttcacctgtgagattggcagaaatcccaatgttactgcctatcaaaatgacaaacacacatagtatttgacccagcacatttctcttgcagcattttttgttaaaggtgaagctgtatgagttgaaatgacctatgtgtaagatttttcattacaaccttgcttgcaacttcaaatgaaaaaaaaaaaagtgaaagactatcagacagttactggataaataagtcctcacactaaacatgaatgagcgaggaaaacattcctggagtgctattaaggagttttctttcaatatacggttcaacatttcccttaaagatggaattttggtgtcacatcttggacatgatatagtattatggtgagtagaagccaaagataacactgaaaaatctggaataaatagagaaagctcatctccagcctatagttatccaatcctaaaaatatcactagtgtctcaagttgagaaatgctgttggatggtagaaattgattacatgacttctaaactgtcaggttttagagacatgagtacttgggaactctcccatgactttccactttgtagtcattcaattccatatcataaatgcatgtattgcctcctcaaaactacatcattgtttcctcttcttccttttcctcttctccttcctcttctcctccacctcctcctcctcctccttctgtaagccattgttgaacttggaaaagcctttcaaagcttgtgaagaaaggtttgactatttagcttcttgctcctggctcttgtccccttgaatatcacactgataatttcaccataaaggaggtgatctctcctggaaatgattgccaaatgagagaggacagtaggtcctacaactgtaatctattttgctggatcaaatgggctttagtggaagtaaatatcagaaaaattagaaccaaatcactagaagttgaaaatgtctaagtcaatgttttctcccgagcgaaggtaaacattgtatgaaaggcactgatagcgtgaaggtgactttggattggaagtgacaacagtgactttctccaaagacctctaaagatccctctagaattatttcatatatgtgtggtaattattatgaccaactcctgcttagtgtcccacaaaatagcagccagaaggcagtagaattttatttaccatcaaatctatgttctctctcctctctctctctctctctctctctctctctctctctctctctctctctctctctctgtgatgtatgtgtgtgtgtctttctgtctctgtgtgtgtgtctttgtctctgtctatgtctctttgtctgtctgtctgtctgtctctctctctctctctctctctctctctctctctctctcaattgccaaatggccaaaactatttttccaagataaagccaccaacaggggcccttcatatgccagaactaagtttatttaggtcaagatagcatgtagcctggagaactgcacaaagcaatggcatggtgagaatcactgttccagatttactttcattttctcaatcttttcctcttttatttcagcttttctactcaatctttaattatctttttagatacaaaattcttttatgaggtttaagattgtgcttttgagttctgtgggtttatttaggcgattctcattggacaagtgagtttgaggagatccactgtcatggcttctcatattgtttgtttttgtgctgtgacctgtgacctgggcatgcgaacttctcttctttgttgcatgtctgatgtgagagtctagcctgcctcaagcaaggttggtgctggagcttcatgacatagcaatgactgggagcatagagatggcatgagaagctctaagcagacaaaccaaggaaagccactgtacaagctgcacgcacattgtcaaaacgtatcatatgtaaaatataaaaaacatgtgtaagtagcaatgagtcttaaggatcagtcaccctaagaatagaaataaatgaccactttcagcaaacagaagatgccccataactatgctcctcagcaaatagacaatatttaaacatcactgacacctgatatttcaacatcctttgggctacccattgcccttttcttgtttcatatttaaaagtgtataaaaatgagaaaccagaggacagggggagcagactgatatctttttgtgtggatgattataagtcactgctttcactcacaagacaaacccaggacagaacaaagcctctattatttacagcaagagggatatgtgtcaatcagatcagagtggattggattgggtcaaaagcaacattcccttaggcacagcattcttaggagcttatttagctggagtaatttatcccatcattccagatagtcaatgaacaagacatggaaccagactatggatgctggttaaactatgttaaacttcctccctccccaaccaaaggatgtgttcttcttagcaaaacaaatattattttaaaatgggtgacaaaaaagagaacaaataaaaaatctatatataccattaaaaagttgcatgtgtgataaacatgcccgaactcaatgaattcataaccctgatgagggaaagaacacacagagacacatgtcggtggttattcctgctcttcagagtgatgtatctatcagtagatgtcccctcctagtgtcctaacttttcattcggctgtaaacattctgtgaaaactgtttaaggtcaaggtggttatggctctcactatatctgcatctagggttcctgtgttgaaaagagaatgggatggatgctgatggggagtatcccaactctaaaacacagtttctacactaagtatttagaaagccaacaagggcctaggtgatggctccggtgtaaagtgtttgctgtgcaagaatgaggaaccgagtttagaacccctgcactcatgtacaatagcagggcctgaagtttatacctgtaattctagccttggagaagggggggcaaggggatgcctggggctcactaccctgatagctctacgatgctggtgaggactgggttcattgagtgttgctgttcactaaagaatgtggggtgaggaattaggggagacacataatactgtttgttttctttaaatggtatgctatgtggtctcttaagcctgttaagtagtaagaacctatgccatgcttgtcccagtgtgaccactgaaatagcaacagaggggtgggaatatccagttctttctgtgttcataacacaaagattgcaatagattgcaagaatgatcagttctgcattttgacctttacatatggaattatggttttcttttgacacttaaaatgaggcaattggaaaggcatactatgtgaatacaaaaaaggtaaaggggaatcacagataaatctagagaaagaaagaaatttttgtcagaggaaccttagtttgaatcccaactctaaatctttaggaagttcaatatttacatctgaaaaataggaatgagttcttccaacaactagttattgagaaataccctgattctggagtatatttggtctctctctctctctctctctctctctctctctctctctctctttctctttctctgtctctctgtgtgtgtatgtgtgtgtgtacatgtgtatacatgtatatgagtgcatatatgtatgtttctctctgtggatatgtatgtttgtgtatgtgtgtacatatgtgtcttttaactgttccccatgataacagagagatagggggagagagagagagacatagacagagattgattgattgattgattgattcattgattcattgattcctgggctttttgtaacctaaatgtccacccccagtggcacacttccttcaaatagaccacagttccttatccttctaattgtttcaaatagtgccacactatttttagtgtctaagcattaaaaaaatatgagcctatggtgggcattattattcaaatccaccacagtctgtgtatgtgaatatgtgtctgtatatgtgtggtgcagagatttaaaatcagctcaagtcatctgctcttaaaggtgttagctcttacgggacacgtctgctcttacaggtgttggtagaaatagagttggagcctaggaagtcaaagccttggaccctgcacaggcacaatctttgagtttatgttatgtggatagagcatattgtatcattgatgatatcactagcaacaaaagtaacatatcatgcttcaggctcagaattgaagctcagttgatacatgatgcctttttgttatctatacttttctaatattaaaatcttagaactttatcttgattgatgggcaatgtaaactagaagtttgctcctggttttttcccctcaaatctcaacaagagactacaatgcaagaatcagcaggtgagatggacttctagagatgaagtgccagggtgtttgttacattagcagaattttcttccctggcaaccccagatacaatctatggtttccaacatcattgtgaaaagtgtaataaaatcccccaagaaaggtcagcaagcatagggagcaggaatgatgcccacagcgtccatttgaatccctatttgatcaacaggaccccagtgtgcttccctcatcaaaaatgttaatcagtcacttcgattctcaaatttaagtttgcaaattgatctgggaatactttgtagtttctaaagaacctaaatttatctgtcagggtctgggggactggggagatagcccagatggtaaaagttgctgcgtaaggacccactctcgtatctgcattgtccacttaaaaagacaggtgtgttgatgcccgtaatcctaggtagggcaggtggttccaggagctcactggccagtcagcctagccaaagcagtgagcttcagatttagtgtgagagcttgtctcaaaaacaagagggaaagacacacttgaacatgtgctcatacatgtacacacacacacacacacacacacacacacacacacacacacacacgaatcagagttggagagaactcactgatcatgattttaatccaaacttctcagaagccccggaagcacactggagggagactgcatgggaggtctccctagagggcccgatctttctctttagaaggaagatccatgattttgatggctgcgatctagaaacctttaagagccaaaggagtcatcacctagtaatttagcttcaaccctgtggttcactggtggttcttttcatgttcaagatggggaattgttcaaacaatatagttggtttgaaaggcttccagggccaatgcgaacaccaagtgggctgcccagaaaccacacattgtttcctttagacaaaagataatgatgctctaatgagttttaccctttattgccctctctggaacacagcctcgggaagaaaacccacaaaaccaaattgttagtcccaacatttacaatattttgcagtgaccccaatcccttttactttaaatgctggtacttgtgttaagtgtttgtgctgtttaactcatctaccccaacctcatataatctcaaaagtgccctcccagagagagagcggaaatgagcaaatgaggaaaaatactaagaggcttgctgatagaacctccaagacaatcaaagtgcttccgagatattcaccaactgacgggaagggtaggtgacaagccagtattactttgagctattatagagaggatgtatagtgaaaaggaaccaggctaatattgttcatttagtcaaaagcatttaataaatagcctaagtagaagtgggggacattacctagttgatagacctttaaggatttgatgagcattgtgggtatgggattcactggggtcattgatggtgtcctcaagaggtgggaatatctgtctagccggagctgaaattacccacagctcttccatgtcttcacagtatgttgcctcttagtgccagtcactgccttggccccaagcacacgcgcacactgcttttcccaaagtgatttttttgggggtattgttttacaaccttttaggagacctactgggtgcagattcctttctgaccatctgtacagatactgctcttctgaaagtcatctgtgaactccctcctgctagatccatggggcagttttgtttctctgcctgcttgatttcagaactgtaagtggttgacatacctgctttgagacacctcttctagatctttgtggcacactttttcagtatttagcttgttcatttctggtttctttgcagtctttttcctctactgcttccttctcaacatggcttgctgtgaccaggggacagtattccagatcttgtttccctccaggatctgtaatcatatccctctaccctgttttcctgtccttgaaatatgcttcacagctgtttcctcctcttgtccatcactacatcctagcctacaaaaccactgctttgtcatctagattatttcaatgcctcgtgtgctcttctcccacaagccttcctttctctacagagcagttgagttcttggttttcaaagcatcaaattacaacctgaaactttgttactttaaatgccatattgtgtttctcactaagcacagaataaagtccatggagtccccactatatgacaatttgtaaagccatccatgatttagtccacatctcctctctttctcctcctctccctccctttctcactgcacagcccagactagcctggagcttagcatgtaacccaggctggctttgaaccccaatccaatattgggataacaagcataggccattatgtccagctctgatattcatctttagttgcctgtgtagagctagaggtcaaatgcaggaccctgtaatgctaagtaagcactggacgactgagatatattccctgcccttctgagccttgggatggctcctcgtggcggctaaattctggatatcatttgtatatcatcactaagagtaaatcctaggaaaaggggggggggaattatttcttgtgtatccagtgctgataccagtgcctggcacatagtaagttcatggtaaatgtctgctgaggattatgggtagatgaaaatgctgaagtggaagctcctattgaatggggaagcccagggacaggtcaggttccagcaataatctcaccaagaacttgtgatagaatcacaagagaaaggcatctctttcgatcaggaagctgagctatgaatgtgagtttttcattacattttatatagaattattcttaagacatctccttataaccagtgattaaaataaacagaaggccagaatactggattactttttaaaaattatgcacactttatttacagaggcagggtttctacatcctatgtcttgtgaattaggttattccagcaaacctacttgcctcatggtttccatctctatcgccttagtgctagtattactggcaggccattacatgtgttgactttttctgtggatgctggagatccaaacttcagtcttcatgcttgtgtgacaagccattgaaccatctttctcttgtttggctccttgatctttccacatattgtatcttgtctgaaaacaacctgaacatcatggaaaaggagagatgatggagggccttgcaggatcacatgatctggttcctgagaaaggctctgcacatgggtgagtgagatacagtgagccaggttcttgggttctcactagctttgctgacagtcatttggacagcatggcgctcaggcttcataagaaagggatactgtgtgaaagtgctggtctcattctgagtgaggtaacccaatcacaaaaagacagacatggtacgtactcactcatatgtggattttagacagaataaaggattaccagcctacaatccacacagccagagaagctaggaaacaaggaggacttaagagagatatacatggtcccctggagaaggggaaagggacaagatctcctgagaaaattgggagcatgggaggaggggggaggaaaccaggagaatgcgaaggggggagaggaagggggtgaggaggacatgagggagcagaaaggttgagttgggggaagaacagaagaaaacaagaaaggaaatatcataatagagggagacattttaggtttaaagagaaatcaggcactagggagatgtctggagatctacaaagatgacaccaactaacaatctaagcaagagagaagaggcttccttaaatgccctcccctgataatgagattgatgactgacttatatgccctcctatagccctcatccagcagctggtggaagtagaagcagacacccacaactaatcactgaactgaactggaatccagttgcagagaaggatgagtgatgagcaaagggggccagatcaggctggtgaaacccacagaaacagctgacctgaacaacggggaactcttggtcccagactgatagctgggatatccagaccccaggaacatgggtgtcagtgaggagatctcgaaaatctacgggacctcctgcagtagttcagtacttatccctagcataggtgtggatttgggagcccattccacatagagggatactccctgagcgaagacacacggggatggacctaggccctatcccaaaggatatgatagactctgatgacctcctatggaaggccttgccctccctggggagcagaaaggatatgtgataggtagggttttagttggagggggtaggggcaggggaggagggaatggagagggaactgacattgacatgtaaaacagtattgtttctaattcaaataaaaaatctgcaaaaaaaaaagaaagaaagaaagaaagaaagaaagaaagaaagaaagaaagaaagaaagtgctagtctcttgcccatctccccaccaccaaactaaagaagtgctttgctttgaacactggcaaactgcttggagagctgttagacctcagcttccatcaatgctatcactgcatgctggctcttttgtttctgatctttattaatgaagacataattaatgaagtttacccttgccagtggaccagagcccagataattacagtttagataaataatcttgactttgatttagagtaggggtgcacattaagaatgccaattctcaggttctaactcagatggtgagtgtcagccttccacccagtgtgtgcacccggtatctgcctttctagtaagttctcaggtatgcctgcttcctagaagcatataaggaacacaagagtctttattgaatttgtattgcacaccaataacaaatattatgaaatttgctcttgggaaagatgtgccaatatttgtttggaaacaatatgttagaaaatatttgataagcttggcttaaggtagagaagcggttctgtttgatgttaacaagaaacattctctgcaaatacttcaaaagttcagtggaagtccattttgtttacattatttataattaggctgatctaagcaaagatctaaacagagagttataaaatgcagaatggacactaaacatcatgagcacatgtgcattcagtaaatatttgctgcatgaatggtacacttaaatttgctttatttcccaaataaaaagcaaaggaatgatgcctttaacctcccagatttttttccttctcaaatatcacttactatagtctggatgtttgaatacaagcaaatgcaacatctgtaatttctcaaaaatatcaatctccattcactcgttcagtacatagtcgctgtctatattttatgtggtgagacttatgctaaattatagggatatggtagacttggtctctactctcatggagttttctgccagagagaatcagcaagtcagctgtgctgggagaagactgatcactggggagacaaaagaaatctcagagaacatagatagaacttcaatcaagaccaccaagcagcttcatatttgcctcattttggctattgtttcaaggcgactgaacttttttcattctggctcaggaatgtgttcatgttcttgtgcgtgaattgatacatttgcgtaggtgtgggtgcctgtgtgtacatgtgcatatggtaaagcagaaatcaactttgactgtcatttctccagacccctccactttgttttttgagacaggtggatcttattggagctcaccaattaggtttgattggctggccagaaagccccagggatcttcctgcctctgccttcccagtgaagggatttttataaaggcatgtgcctccatgcccagctttttacatgggtgctagtgactggacttgtgtcttcttgtttgttcagcaagcacttcactccctacaaaatctccctagagctgaaaaaataatgtttttttttttatgtccagtatgtaaagacagaaagtggacaactgattgcctggggctagaagtggtgtgctttaaatagacaaaaagtacgacatgtgaaatataacccaataacattattggagtgcaagagggttgggagtgtatgtaagtgataggatagcttgcacatggacctgtatttaattcttagcatcaaaaggaagaaaaccgtcatctagttttcataataatcacttacttagtttcttaaatgtttaataggatatcaacaatattggaaagcagattaatacccccttgccttcatgcctatcctgttgtaatctagcaatctttatttatctgttctgttttttgaggcagggtttctctgtgtagccctggctgtcctggaacttgctatgtagacaaagctgggcttgaactcagatatctgcctggctctgcctcccaagtgctaggattaaagaagtgtgccagcaccaccaggctccctgttgcaatgttgttcctgcccacatctgccttctccggaacccatccgtcaagctgtccccaaacctatccatccaggaaagacttaattttcattaattaaatttgttttgttgacaattccatgcatgtatataatgcattctaaattactcttaccccatcttacccgtctccctctcacccgtcataccccaaatttccctagacaatggttttccacatttatgtctctgatttgttttggaacccggtgggtttaaccagggtcatctgtttgaccatgggtttgaaactgtccattgcagcttcctgagctcaccaatggcattgactttttagatgttgtctcaccaaacttctaatagtctttgtttttcctgctcttgcaaggttatcctgctggatttcctttctgcactgcactggaaaggctgttggtagtcagaattttctttaggtagtaagctcacaaataatgacatggagacttattaattatgaaaactaagcctatacctcttataatttaaattaacccatttatattaatctacattctatcacatgacattgtctctcttccatcctatttcctctctgtgtctcctggcatttcctgtatgcctagattcctcctcctcttcctttctctccttggaaatcctgcctatatctcctgcctagcttttggctgtacagcttcttattataccaatcacaatacaccttcatacaatatgcaaataccgcacaacagccattttcccagagttccatccacatcctcatctcagttctcttctgcttacaggtaacccattcttcccatccctacatggccagatagaacttcctgcagcctgtcttggcagggaattttctttcttagtgcatgtagacttcctgtcctcatgaagcagctcttttctcctctcttacagtaaatactcagctccaccccacaacatccaattgattgatgcaaataacctagatgtttttcttccttgttcttgggtctattaaaagacaaccttgtaaaattttcccttcctttctctccccatatacccttcattcagtccagtggtttgatttcatggctctttcgaaaagccaatcacatcacgtcctatttccaaggttaccgtaaccattttcttgatctgggatgctattaattcccttctggtatgataaatctttccgccaaaagctgctgaacccaattccacatgtgtgctttacgacagccacctgaccaagttagggcccaaatgaatacacagaaacttgtattagattcaaatgctgcttggccaatgactaggatttctcatctgttagttcagtgttaactatcatatacctatatattttataagacttatcttatcgggcaccttattggcgtccctccttgccggtggctcatatcctgctgctggaggagactaaggggaaaagggacacttcctatttctccttgctcaaatatgagtctccttgctatgtcacttccgacctggatcaccacttttctactacatttcccagaatcctctttgactcctagtcctgtctaacttgctgtttcattggccaaacagaactttattaaacaatcaatgagataaacatacacagaagtatcacagaagttatcacagagcactgatgatgaacaagtgggtcagttaattatgcagctttaacaaaagtgccacctatttagggcatgtaagtggagagtgattttactcttgttattcatttctgatgtgttttcaacatttttttcttcagtttttccataactccatctccacttgcatgtttcaagtctctggttgtctctgattatgtttgttttctttggttcagagccttggatttgccctccaatttgtctgaattcaccatcagttgtcaatagcagctaactggaaggaggcagagtgcccaagaagtaacaccaaccaaaccagacttcttgtttcaattagattacttaatacagggttttccagttctcttcagacccattagccaactaagtattttgaaaattgtcagggaagagaggttgcagtatttgagagacatgagtgaatgaatcagagaggaatggagcttgagctttttcctaatatttatatatggatataaaatttttatgaaccaaagaaacggagggcgacttattgttcttgcccagcattattaatgcactgtttacatttatgcaatttatgtgttatagtatgactcttcaacattgctatttctaaatataacctgtggctttcttagttgacatctagaatttgcagtgcacgtcatttaaagattatctcaaattgagtcttgcaaactaaaatccttcttaccatctctaaaggtctctaaatgccagaggtatttcatatatattattacatgttttttaaagtatgtacaaaatatccctttaaagaaaatgctatgtaattgtttctccttaaattcacatttcactgcagcctttctagtagtttttatatctgttagtcttttactttttattctgtcattccttttcgtgaaaggaagtaagcatataggttttaccttttattcagtggccataaagcttaaaatattcaaaatttcctgtggattaatgattttagtggataacagtaattgataaaatagcatagatgccctatgaacttaataactagttgctaaacctagaattgtacatttcagtggcctgcctcttcacaggggtgcctcatatgaggagctgtttttgttaggtgtgcgttgtgattggatgctgctgatttctagaaggtaagaggagaccaagcaatgggatgagtggggcaggatgggagcaatccctttcttatgtcgaaaaacagaagggaacactcacaggggcaggaagcaaagggagtttgtttcaaagtaggcacatctcctatccaatctcttaggagagaagcaacaaatgaagtttgagggtttgtacactggtggctgtttaactccctatgaatatacaccatcctgagcacctgtaggaactgaccatatgcctgcttaaagatagggtagcgagtagaattgcagtagtccttagaggagaaactgtaaagaacatgagatcaagggtctcatgtggagggatggacagcagtctaaaatgtaaggagaaaagaagctgcaaaacaatagtcctgaatcacaggcaagtgcttgaaggaattttcaaaagtgtatttttaggtttgatggctacatatgtactaacaactcactagctgagggctctgtgacaagcatgatttccactgaaaactctgacacagcttcaatctcctatttatggtgttaaaatactatttaaaaagctgcatctatctgggtgtggttcacatgcctgtaatccttttacttaggaggcaagaggatcagcaatgtaaggccaacctgaacagcatagcagtatctgaggccagcctgatgtacctgagaccctgtctccaaaaaccaataagcaaactacactgattaaatagagctaaagtccatttacccagtcagtccttcttcacacataaataaatgttccaaaccatttgccatagccaatgatcaaatatccttgaattccaaatattttcatttatatggatgatgtgcttatagtggcttgtggtatctgttggctgtaattaatcaattaaaaaaagtgaggaacacaggaagcaaagattatttaggaaacatgaatgatttcacaataaaaattatactcaaatgacacccaatgactaacagtgaccctaggaaatacaccaggcagaaaaataataaaaatggtagagagaaatagctttacagatgtttagaagttgaaagcacccttgcatagggctgaacatgtagttttctgggtttcacatacaaagtggaaggtgaagcgatgccatgggagagacaaaatcaaaaggctatctaggcgtgagatgtggcaaagtgttgccaatggatttcatgtgtgagaagataggttcaactttccagcaagccgatatgatttaaaagttgaagactgatcttgcaaatatcatgcacagaggtcagcaggcagtaaccaaaccgggctggattcatgagcctatcattccaatcagaaatactctcaatgtgctctgtaatgcataaggctgatactttgtcttacttgcatacccttgcaggggattccacagcctgagacattgttctgtttcattctggtactgtgacaagtaactttaccaaagcaatgaagaggaagaaagggtttatttgacatttattcccagcccatagtctatgcttagggaatagtactcccacagggagttgggggcttttataccaattagcaaccaagacaacgccttggatctggagagatagctcagcagttaagagcacaggccgatcttccagaggtcctgagttcaattcccagcaatcatatggtggctcacaccatattaatgaaatctggtgccctcttctggcatgcaggcagacatgctgtctacataataaataaataaaatcttaaaaaaaaaagaaagacagaaggaaggaaggaagagaagagagcaatgcctcccagacatgcccatggtcaacctgataaataaatgcctcagggacattaccacgaaccaacatgataaataaatgcaatcaattaagcctttcttttcaagtgagtctatactgggtcaagttgacaggtgttactaagacaggcattaaatccttgcattaaaaaaaaaatcagcactagtaatttctcctggcaggtctcatttcatctaggaaagaattcccagaggtgtaccactacccatgtcaaaaccaactaactgaaaggagatgaggctaattcattggcttgaaccaactttccacaatatggtatgtggcaggttcatggtgaacttagaatccaatgcttgaacagagcgtggttcttctagagagggcaaataaggctataagttctgaagtggtaaatgagcagtctcagttttctggcttaaaggaaaacactgagttggtcactagatctgaactgtcaggagagcagcagatgcacaggaaatgattgaagagccacaggacataagggacccaggattccaggagatatggggaatgtttagtgggcaggtgggcatagtaactgagagtcatgagcagagggctgacagctgaagtcaaaagcatggatgaggaacaagatgggatttttttaaaaataagtcctatggaggaacttcagcctgttgaggaaagcaaagaaataaaggggggatagagaaagtagatgtagactctcatgaactccagaggaagcaacagagtttagctttatcaaagatgacccaagagctactgtcacccctaaaaactgtgatgtagcaaaatcaaggggatggaagaaagagtgagcagaaaagctttgctcttctcaaagcatcttgggcaggccagtatgacttttaatgaatgtgtacctggaaaatctctcctatgtgcccagggaaaagcaatctaggaacacagtaccatcctggaagggtgggaaagtcactgctgaatgcagtcagtgtgctgtggccagcttcttgggcaccttatctaaaaagaagtaacagggactgtctggtggctgggagaagagtggcactatctacaaaacccttcacaaactaccactgttcttcctttgaaatgaaactcatatgtacttcttggaaagtgacatgatgtcagctgtaaattcagttcttaattggtttgtgtaataaaaacccagagtctgatatagagggaaatgctgagagatcagagagaagaaagaacaagcgatctccacaccttacctccttagtgtctcaactgacaagagagctagttcctgtttctccctgcttatatcaggtttctacccagctatctcacttcctgtctgtctgtacagacctccagaactctatggttagctaaaggcaagctccattctctgaccttcagacaggctttatttgtacaagcaagatatcaccacagtcagctccactctccacctcacagtatcatggtccatgggtgataattaacaccacttgatcgagggaaatctggaggaagccaacaggggggccatgttcaaggtccagaaatctattatacttcccattctgatgaacagaagccacttctgtgtatatgtcccagctgccacagagctctctcatccattcccttatttaatataatagtcttttgccatatcgccttggagttgcattgcctatatgccagcacttccctcagagattaggaactttgattatcctattacctttgatatctacaaatcaaaatacataaccacaaattgtattttctttggttgaaaacaattttaaaagcatgatatcatttttttcagatgaaaaggaattggtcctgagaggaaatggtcagtttgacccagacaatgaaaagtaaattcatccatttggatttcaaactcctgtatcatgtgggatgctttgatatttctgctttgaaattgttagctgcttctgagtctttttgtgacacttcagagatttacagttaggacttctgagtttgcctctcacaatatttcaacttttctggcttcaaatgaattgcaatcactcctttgtagtcagagcatcactgcatttgatcttgatgtgaccttataatcagagacattccaattaatagttaaaatgtcctttcccttttttccagataggtgaatgttatgtgtggcagcaccaagtgttttcacgtatatacattgcagcagcagggacccacatgttaccccagggaaagaatgctgacatcagcacttggaaagcaacctatggaagctagtctggttcaacctgatcacagcctgtgacccagcatttgccccttgtctcctggaaaaatctgcaaccagcaggcataaataaacacatgtttgaagtgttcagtgtagcactatagactacggagcataagccaaagtgccctgcagtcactcagtaagatgaatggatatgatccattttaatagcagagggatgaacagatgtctgcaagtatccacgggtgtaaaatcccaagcatgcaattctgaaatggagagtagaaggtgatattatttatgtaaagaattattacaccctctcaaaaatactcaggcaaaaaacataagcagtaaatggtacaatgtgtcctgagggcagaatgctggtcatcttagtgagggcattcaggaggagttacaggagggacctataactctctatatgttcatattatattttttcaaaatagatactctaaaataaagatgagaaatgtcaataatgcttccatcttggtgattgacacatgagatttattgcattttctatctcactcaatgaaacattgaacagttagaaattatgaaagaccactgtgtgaccaaagaacctaacatgaagaaggcaacaactaaactggataggtggggtttgaggcagacatttgtgaggcttttctgtaaaaggccacatgatgaatattctttgactttgtgaacaacacagttactggcttcactattcattctgcccttaaagtacaaatgcagccatagtgaaaagaaaaatgagtgggtgtggccatgttccaacacaagcttatttccaaaacagaacctcaggtttggtttggccccatggaccatagtttacctcagtttacagttgccaggggcggggggtggggtggagataagtggtttcagaaacaaggaaccccaagcaaaggatgatcttggagaccaaggaaatctgaatgtgcctcgagagagttagacaaggagctaaacattaccttcccagtagaagactcaaaattacagatgaagtacctttgcttgttgaagctgtggctgtagaaaacctataaacaacaatccctggtggttaacatggttgggggtctgggtttgcagtgttttgcttggttagagtctgtctatttgggtagtggagaagtttatctcaaatagtttccttcatccttccctggcattctggaattcctaggacacagaaaatatccgggccccattctattctcgactcctactcagtccagttcagtcttgggaggatgtctaaaatccagcaaggtcactctgagagtgaggtccccagtttgactgcatctttggctattgctcatctgcatacacccagtgactcggcactgctgaccttttctagaaatcacaagtttcatgtcatcgacccttctatgaagggctgatagaagggactttttatcctttggctacctagagggtagccttctctggcttcaaaggtcaggcccaagggcgttcacttaggggaaatacttccactagagctctctttttatacaatctactttggccaagctggtctgcttgggccatcagcatttatagtcctggcacactttgcaaattgacaacattgtcaggccagaaagatggttaataaaaccaacaggagttatttatgagtttcttctgatacaagccaaacacaagatgtgagagttaaatgaagtatcctcgtgctgtcattactggcagccgtagccgcattcctgagaggtggttacatgccagccattgctctgaacagaacgggggttcaggcagcactgaacgctaaatgcaggtccagattggccccatgacatgtgtgtgggatagatgataaaccgaaggcagagatgtgcaccttctctccaatatgactcttaccagattgcaagggcgagcagagaaggtgtcagtggcagtagctggttcaactgcccctgaagtaataaggacacctcccagtagccattgtagctaaacaagtaagcaactagcttacctgttctggcactgagatgccaggtccttggccaacttcttaggagaaattagatatcacacacacacacacacacacacacacacacacacacacaccacacacacacacacacagagagagagagagagagagagagagagagagagagagagagagagagagagagagagagagagaggatggagatggagagaaaagccagacttggccccagttgccgagattttatcagtatctttccctttcctaaaaattggaagtttgctttccttcctcagttcttgggagacacagcttccagggatggatgccagatgtttgcgtgcccttttaaagtgctcagagaaagcctgttaccaatcaccacattgaacattgttcacacgaagagtttctgccccgaatcgatctgggcatgttttagctctcttctccctgacaacagtaagaagctgctgaaggagaaagcatgctgtttgagcctactaagagtccaggataaactgatgtcggagctaggagcagaggaccaggctggccataaatctttcctggctgagacttgaaaatttttggttttgtttacttagcatgttaatagttttggaaattattaaaatagaaccaagagactctccttttaagaggctatggagatcacaaatcactccacagatacaatatgctgagcaaatccaagtctcaactcttgccatgggtctgctagaagtgtggccattttcatgtgacacgtcatgtgtggaaccaaggaggcgtgagaaaagcccttaaaagaaacttggacttaaaattttaataattgtggtgtacaaatgtttttataacaggaaacaaaaaatcctttccctgtctctcagttcttcaatgtttcttcctgttggtcaacgtcactcacattctctaacgttagccagtgtttctggtagcaacatcaccagaacaaattcttttttaatttttctttatatctcaatgaacctaggactcaatgattagctaggttggctagccaggaagccctggctccccagtctctgccttctagtctggaatcacaggtgtgtgcctccatgccaggctttcctttactaggtttctggagatctaaactcgagtcttcatgctgtcacaggaagcacctaccccactaagccatttcctcagcccatgctttccagatgttgagagacttgtctgccccagacaccaaattaccttgactcttatcattccttctccaagcacaataggtacattttcctcataccttcatatcctctgtgaccatgggtttcctcgttagtcagctttcctttactgacacaaaatactggagataactgagaaagatgaagggtgtgttttggctcacagttttgaaggttttagtccatagatggttttagtccatggagaagtgccagatcaagggaggggtgaatgacagagcgagctgctcacgctattgcagtccagaaataaaagagagaaggcatctagctggagtggggtggctgggtcctggtggtgccatattaccctggttgttgtttgtgttcttacacttatgtttagacatctggatttggtttctaggtctagatgccaatttctggatttgtctttgttaggtgggtgttttcttccttagtttctgtttcctttctggtcttctggatcccctggcctgtggatgagtctagcatctttgtccccactagcggctggacttttgatattctggatggtctctggtctagcagggggttgatgcccaagtttaggctgaagttctgcctatgtatgtgcatggcttctgatctggatggggggtcctctggggttctgatgctgctcgggagcaatctaggccctctgcatatatctggcagttatgtagcttggtcttcttgtgggactcccaacagtagtagcaggggctatctctgactcttttgctggcttttgggaccctatttctcatactgggttgctttgcccagccttaatacaaggtgaggtgcttagtcttactgtaatttgatatgccatgttttgttgacatccttgggaggcctgccagtttctgaatagacgtgaataggatggagaatgcagaggggaagagggcaacactgggaagagaggagggaggagaaactacagtcaggatgtaaaagaaataaattaatgagagagagagagagagagagagagagagagaagagagagagagagtaaacatagtcttgcatcttagattaatttctgagaaaatcatgtgactttcctagaagtgccaccctggagaaggtgcaggagaagactatgagagagaggggagggaaggagggaaggaaagagagagagagagagagagagagagagagagagagagagagagaggagaagaggaggaggaggggacactggtcccacactctatttcaagggtatatccacaatgacttacaggcttcctaccaggtttcccctcttaaaggatctgccacgtgcaaactctggagaactcacatggaacctggggaatgtttagctgcacaactgtgacaggaaaataaatacacgtattgataaagcttctgatagtgtttacactaggatcagttctccagaaatacttgacgacagaaggagtcattttggggatgatatacaaagccacttttcacttagacctggactcctaacagtgatctacacactgtgatttagcactggcctttcaacaaaactttacaaaagagatagctatattcatggaagcctagattacagagctgggatgcctagattcaagtacttcatatacaggcttagagattttggcaagttgcacagcctttccaagcctgtttccccatccatgaaattgagaaagcagccgtacctatttaatgcaactctgattataatttcatttacatatgaaaggaaacagaaaaccttctgatataccttgggaaccaataaactgcaattactctaatattaaatgaccccatgagcttagaattgaaaaatgcaatctgggaccaaggactcaactcctcagggcctcagtttacttcgttgtagagcctaaggctgtttcaagatgcaaactgtgaagagactccagtgtcgagcagataagccagcattaacccacactgtgaacacctgtagagtcagtgctgggtgcagttatttctactaatgtaaattggctttgggctacaccaacactactggctttaatttttctgaaatcattcaacttactattatatccatatttttctccttgttgtgacaaagtccctgacttagccatctgctaagggaggaagggtatggcttaccgtgtaagaaggggtattgcctgcctctaaacggaaagcattgtaacaggaacgtgagtaggactcttcagcagtgaggaaggaaagagcagacaggaaacagcgccagctgttccccagggactcacttctgtcagggatgcattacagctgagacctaagtgttccaacaacgtgaactatgagggatgcttcccattcaaatcgtagcatggccttcccctatagtgctacaacgtacttactattgggttctgtgtgtccatagtcacagctgcctccagtggtactgtttactcatgtcagactttgatgcctctgggcatccagccataaacactaagaggaaagatggatggtctctagataacccttctcaaccaactgttttctcttgacaggatgttctggaagctctcgctgaccttgctcctggtggctgtgctggtaaaggtagctgaaacccggaagaaccggcctgccggcgccatcccgtcaccgtacaaggatggcagcagcaacaactcagagagatggcatcatcagatcaaggaggtgctggcctccagccaggaggccctcgtggtcaccgagcgcaagtacctcaagagtgactggtgcaagacgcagccgctgcggcagaccgtgagcgaggagggctgtcgcagtcgcaccatcctcaaccgcttctgttatggtcagtgcaactccttctacatcccgcggcacgtgaagaaagaggaggactccttccaatcctgcgccttctgcaaaccccagcgtgtcacctcagtcatcgtggagctcgaatgccctgggctcgaccctcctttccgaatcaagaaaatccagaaggtgaagcattgccggtgcatgtctgtgaacctgagtgactctgacaagcagtgaagtcaccagagcaagacacagctcaaccctgagcgccctggcccctgggtcgcaccacctccacttctgtcgagcctactcacactctgcccggtgtccctgtcagcagcaaatgcatctcttagggctaacagtgtccttgtcacaaatgtggaccgcaagtcgtcatgtcccagatccaccctgggccacactcatgtcttcaaatccaggctatggatcgggcacagaagatgttggaaaacactctcagataccagacaggacttttcaagcgatgcactgtcaatctggcattgacatttccaccatgtggaaaagccagcctttctctggccacatcctacactccagctcgaccctcccctggtgaagaatgcaccactcttctgtcgcaaacttctgttggctaccagaccattgtggtgtgagcattcattcttctaatgtgggagctgccaggctctgcgggctgctgtgatgtcgataggggcagcgtccataaaggagatgctcaccctcaaggggtctccaaaacaaacctgattcctatgaggacaaggcgagctaagcgaatcaggaaatgacgtccctaggaactgtactaagcaggtcagaccctccacacctctagacaacaccacctcttttcttgctcctcatagcctccatctgttgactcaagatgaactctggtgcacgtgctattccctctgccattagcctgtcaccatacaaagggtttcttattaatgtcacttttataattgatctattgtgtaaaaaatctgttaaaggtattatcaacctattcatgtatcgactcacgtgttgggactctggttttgcagcacattctgaataaagagtagaacagggaatgatctgtagaaaaggcattttaccgggaaatactgacaggccagcaattcagtgccacacaccttttatcaggttgagtggggaggagagacacctcattattttactttgagacacgaaagcatttcagcatagtgtagaaattggattgggatggatggtgtctacagaggagtcactgggaagtcgtaatgcttgatgcacacatgtgaaatgagaccttgtactgtcttcactgccataacactaagcaaaaaaaaattttctattgaaagtcatttaagaatatatggaattgagacactttgtggcacaggcagaaataaaaataaaacatagagggtagtagtgtaggtaaactgtcactcagaaaatagcttccttcccaaagaatagacttctaaaaatactaaaaaaacttaggtcacccctttgactttgtgatgagttatggaagtctctgtagtgtggtcttttaatgtgaggacatggaaataatttattttcctccaaaactacactcacattcaacctccttgtgcaattgtccctgtgactgacatgtatggaatctaacaaatgtgaatgagaagccattggtggggagcagaatacattaatatcctttggttggtaatttctcagtgcatgctcatgcccaagagtgggtttcctctaatatgagaaaccatccataagctgctctgaaactcaggcttctggatgctcagtagtgattatgctggctctccagcttgccaccaggagaacaggactggggtgagctggggtggggtgtgtcaatgactctctttcctgcattgccatgcaagttttctagtttacttacttctgcaacacagtaaaccccgagcatagatggtgtggttttgaagggggtattagctttagaaatgagagcgcacagcctggaatcgggaaagagaagtgaagagaatggagaaattgccaaggcctgggatgcctggaatgaaggcaaaaggtgaagtgggggggggaggaagagctgcaattttcacatttagtagaaaacctcgagctagagccagagcagagcatgtagcagacaagctatgaaggacatcaagtttccttaatggaggatgatcagtacaaccgaagaggaggagagtctcacacccagctgcaaagcccatccatttcatgttagtaacggacccacacgagtagaggaagagttaagctagcaacccacaaagtacacatgttaacactctttatgattccagtcatgtctgttcccatgaaagcaatatgatatgctgtggtctgaggctacttcttgggttattgtacgtataatgtttaccttcaagtggctcaaattgtatttaaattttgtcttgtttataagtgaagaaaagctataagtataatgtaattattttataggtatactattaagttatagaacaaataaagatactctaggattatatgtgatccgggtgtcatgtgccataaaagatgaattctgcacttgtgtcctcgggtcactaggactcttggtgcactcagagtgcattatccagcctctgggagttcacccctggcccatgtcacaaactgtcgttgggggcttgggatcgtctaggagaaccagaaacacacattgaacaaacagaattggtggggataactctcagtcccagtctataggagcttctagcctttctcaaatcacccaccagctgaatagagaatgtactcatggtgttcctggaataagaaatattgaatgaggaagctttgagaaactgatgctacagaggtccacctgaagtctcatcgtctctcttgtagccagtgcaccacactcgtgtcttacataatccagaaactgtactgggttttgcttaattttacattgactttccacggatttcaacatttcttaatttaaacacgtctcagttcacagtgttgacattttcctgcaagttgaattatctgccatttaagaaatgcaatgatcaataaaacatacaaatcttaataaaattgcctatgtgtgattcactgtacagaattttagtgatttaaattcaatgagacaaaaattcatcttagtttattaaacaagaatattccactttgatctttgtcattacaagtgacttgttggctagctgagttttaggttgtaaagtcattgaaaaagaactattggcactgagtgaacaactcaagagtgtaagactggaaagtttatttaatgattgattgattgatcaattgccatcgattattgtttgaatgggagaaggataagagcaaatcatcagtgaagcaacgaaagcttgttgaccctcaggctatcctctgaatcttccttaaacccacccaccccctcccccactccagttaccagctccatggctacagcttctcaaacacagcaggcaacccagtcatgtgaccaaagacgaacaatgtgaaacctcatagcttttgtggatttttctacatttcaatctagaattcgaggtcaaacaaacaaacaaaagacccagagaccccactgctttatcattctttgaatcctgagatcccccagtcagtccatcttctttcattcattctgtcttatatttggtgcatgtgtggtattaagagaattcactggatgggagagggaaagcgtatctattctattctctctagtaccaaaggcattgagaatacttgtaaggttaatcagccagtctctaaggtacattttgtaagtaagtacttatcaaaatttcctgcatatgcatatttgacccatttttcttatctagcctgccacatgacattactgtgtagtacagaatgccccccaaacccaggtctcctcaggctgtattctgagatgagggataacaatgtaaatagactaaaggcaacaaaataaacaaaatgggtgtccatcccataagaaagtagatttcctcttgttctcttgctggtaggtgggcaggagtcccatttgctactctggcagagactgcttctactgttgcactccaatgtcctgctgtctgttatctttgcaggagcaaacaggagaaatccataggtctacataggggccagggcaatactaaaacatttcaccatttcatttatcccccttcctgccactcctctttttgctgggataggggcagtcagagtttctgcttgccactggccactgtaagagttcttgactgaggtcaaagaatcagtgtgaggtgtcttcaaacttccaagagtatcctttctcattttgtatctggagaggagataatggatcagaaggtttctccaaggaatggctctccaagcagtggcccaccaagtgctagtctttagctatgattaatgtagcctctatggcttccacattaatgccaggatggttcattcagtgtttaggagttagtgtcaattacaatccagtggtgaaaaaaaatcctcaaaagcaccagggggtctcccttttctctaaagtgcatgcacttagctaagtggtccaatggtcttagaataaggagttgggagaaaattaatggttagaattgccctaggttcttcattcagagagaatcaccactccttcagccaatgcatttgttcaaagtctgatctggaaatggggtaggggttgcagtttcctccttccacctcttaccaccatcgctgatatttttattgagtgtgctaagcaatactcatcttaggagcccatttagaaactgtagaaatatgcctcctgaaaaatcagcttcttataattactccaaaattaggattggactaccccgagagccactatgagtctaccatgcctttgcaaaaacttttacattatacctaaaagctaagcattaatacctgggttgtgttattttggaattttgctatctcctgtctgacggggtctagttacaatagcacgggcttattgccgagggcttcctaggaatggagtcacctgggttttgtcattgatgatgatgatgatgattgatttgtttcttcaatttttaaatttattttcttgttttggatccatgacagtgtgcttaattgagtgggactttaaatccttttctccagtacacagaatggaagtctctatatctcttaatctggattgtagctttcatgctcttccagaattatccaacaggttaccaccatccctgtggcattttccctagatccaaataagacactgcttttctgatgcgaaataccccttatcttaatgttcaactccccttcttcgacccagcagcctcgggaccccatcacttctgtgcttctttccctaggtaccacaacgtcttctctgtgttctcctctcttttccctgtgttgtgtgacttttcctagagagaggtggacatctgttcatcgttgagtgctaataatggaccaaagaaactattctattcctttctaacatggtaaattggtgagtttgcttttttgaagaagcatggatgagagattacttaaaagagaatcggtgactaattcatagctgcaccacttaacaccacactccaatatgggtgatgggtcagaacagtggcattgtgggtgctgcctgtgcaatgtgcacacagccccattgaagagtctcataagccccagaaattgtttgctacccatatatatatattggagaagggcctcatgatcttgtatctatctgagcttcctgagtctctttatagattccaagttgtgttgataggggtaggagtccttgacttcctgaaagctgctgcccactgcccacctgtcaggcagtgctctgacaggaagaagggtactccagctccaaactcaaggccagagagcaacagaaacaaacaaacaaacaaacaaacaaaagggaaagcccacagtgaacaaaattgacaactagaactttgaatataggaagcatcaggcaatggcctgcaaggatcacagtagtacctggaatagataaactgttttgacagctcttccttactaggtcccatttctcaccttatttgcatacccaaactcagccaataagaacccacgtggttttgaataaatttgcatgtctaatgtttcagtgtgaaggaaacactgagagctgacagaggaaggagagaagggagacagatgactttcaagacttgccacgaaaagacaaggtttcccacctgaatcttctcctagccaggagtttgattgagccagccttcaggacttgatcaacacctgcaagtagcagattcatccctgcctcagtacccacaaccccacattcctgcagctgcttgtcacctttgagacctgcccaggacaggagacaggtgatggtctcgactgacaatcataagctttcatcaaaaactgtcttcttctcctcaggaggcaatgtttcaattcagaggaaatggatacacaacttcctagctggccagacactttacagtagggatggaagcaaaccaacagacgggtctgccttatttagtggaatttgagagtttgagattctccactgcatggaccctcacactccttccccaaagtttgagacctatgagggctttcacacaggcacaggattcttccaagggctgaggaagcaaacttctctgagcatgtatttctcatacaaccaagacctccttttgagtgtagtgaactagggatgaattagatgttgccaaagagaccctatttatggtcatcacattttgcatagattaatgattaatcatcctgtatcttttattatctcttcaacaaataaatgtcatgtggaataggtatccactcccagagtccctgtgtccactctgtccctcataacttttaagaccagccagggcgtccctccaccaattatcagtgctagttacccaaggggccttttggcagtacatgtttcggcatgcctactgctatcttgccaactactgacaattgatctatttctaaatcacttcttgttctgtccttcctcaggccactccattctgcaactacctatctttggttggttcccccaactttgggacaaagggttctgaatagctttattaggaattagcacatgatcctgtgtgggagcagagaaaatcagactgttcactgggaaaagctatctgcttccagctccagttgaggttttgtctgattctatggagagttctgggactaagatggtattttagtgttgtcctaaactgaagggaggcctttgtaatccatgttacccaatcgctgcccacagggcatctctagaaggaggaggatgaacatggctgttaaatattgggcagtgatatttaatcagtggtctggtttgggtgaaatgagatggtctttcatccctgaagaatctgggcagagagtcccacagtggtcatcctagaaagtgataggacaaggcattgggaggggggcagggacagaagacagaggaatcacagaagtcattgagagagacaggcatgaaaattctacttctcttacagaaagtagatttctgaaagattgacctaggttttagtcacaatacacagaacaatttgaaggaatggaaccctgacccagactggccaatccagaggttcttattagaacatagaccagtaagttggggtcagacttgattagagaattgtatctgaaagaaagaagcagccgtggaggatgcttggtgcatctgatggtgagagaagaatattagggggtaagaggcaggagcccgaggccctgttattggcagatgatgatgtgggcttctgggactgttggatctacaatgagaaagaaatgacattaaggaattttctccaaatttgaagaaacacaactgggatttgaactaaaagccagatattggaaaagatagggaagtagaaaggtcatgaccaagtctacaaacatagataagagtcctaacagagcttagaggaccaggggacagagtaaccaaggaaatgcctcttctgatgactagggagaagaaatcagaggaaatgagtaacattcctcaagaagggctgcctatgtggtgcctgttgtaaacagcgacccttcccctcaacagcccccatctcacatacagtgattttggttcccacagtgcttctggttcccatgcatggttgctgccacagaaaattccaattcttcgtcttcctggaagtgactgccttttgttttccctaagctccctctgtgtgcatgtgcgtgtgcatgcctgtgcatgaggctgtgtgtacacatgtgtgtgcatgtgtgtgtgtgtgcgtgtgtgtgtgtgtgtgtgtgtgtgtgtgtgtgtgtgtgtgtgtgcgagcacgtgtttgtgtcaagcatgagctctcacatgcacaggaatgcgtctaccgaggctcacttgcatagggcagaggaaactttgtgggagttggttctctctttccacctctgggggcctggggattggaattagtttatcaggcttggtagcatgcacccttacctattgagtcatttcacagacccaaaagaatgttcttaatctcgcttgggcaggacatctgacagagttgctatagtgacatggaccactataaattacctccaatgcattttccccttggttacacataatggaccagatggatgtgcttgatattagaaatgagataaattccaaaaaagtaattataaaacacatcaatattcatttattctccaaattgtgccaaatccaaaagaatcaaaggaataaccgaaaacaaagcaaaacaaaaacctctttgttttttcttttaagtattagctttgaccttgcaggagccagtactgcctctagaaactctacatagctgaattcaaattgccctgttggtattttatttggattgcatgaaatctacagatttctttaatgagcactgacattgtctagtcatttccacttttttcttttgtgaccctctcaattgtttctatacagctcttatatacagctctcttgtttttggttgcttcttttggcaatgtggggctagcacccaaggcatgtcacggtgtgggaggcacgtgctctgccactgagctgctcccattccccaactgctggctgcctttgtgagtggtggacttttcacacggtatcttcacactttagatgaatgttcatgatgtctgtggttagatttgggcctagtgagtttatgatatgctatcattatctttaatagcttaatggttacttcgtgcttcctggctatctattccactggatagcaaatagaaattaccccatcccttaaaattatatacctttgaattttcccccattactagaacagtgacaaacagcatcagaaagacagatatattggtcttgttccacatagagccttatgcataccaggtaagtgctctgccattgactacattacagtcttagggatagataatatggctaatgcttttgtgttatgtccaggctgactttactttcaggcatgccatcatttaaagacatagtcgtagtatttgaacattttcttcaaaattgatgtttacttgactttttagttctaataattttctcacatatgtacattattatacacatatattataatatgcaaaccttcataagatcaactaaacctccaagaataatccctgcaccttcaagctcttcctaatatttgctcacattgtagtatatttattattatttataaatgagttggtccacagtattcttctttgaaagtattggttggttgtttatatacactagttatttcttggtggtgtagactgaggagagagctgtgcttgtgtatgagtgcatgcatctctctctctatctctctctctctctctctctctctctctgtgtgtgtgtgtgtgtgtgtgtgtgtgtgtgtgtgtgttttaattctcttttaagacaggtctcacacaaaggaagaccttgaactccttattctccagcttctacctcccaaggattgggatatggcttaccacatggggttgctccacttttgaggatggagcccagaccatcaagtatgttagacaagcactttcctatgttagacaagctctctccttcccatgctttgttggcaacccttcatacaaagccagagcacaggtattatatatagaattctctctcttattcctggggttcttctgtcacctcttagtgatgtcacttatggaccactcgacaagatggaacccatacccaacactgcttggataaccaagaaccagagactagattgcccagggatctaggataaaagcaaatactacaagtctcaaaacaacaacaaaaacctagcaatgacatgactcccaatgacattctgctatactcacagatcagtgctttgttcatcatcagaggaagtgcctgctgtggcagatgggaacaaatacagagacacactccagacattgtgcagagaggaagagtggggaggggaggagaggaaaagagagagaaagacgagacagagagagagagagagagagagagagagagagggagggaaggagggagggaaggagagagagagagagagagagagagagagagagagagaaggagggagggagggaaggagagagagagagagagagagagagagagagagagagagagagatctcaaggattcttaatacccaccctcatctgtgtactaagcaccactggttgcttcacacagaagagcttgggtggcattgaggaatacagcttccctctgaaaaagaaggtctccagggccatcctctcttcatctcctcacagccacacatcagaagacttcccatgcattttctggtttgggtttttgatacctttaatttgaatcaaagttaaagtttgcatttttgctctgtgttgcttcaggatgattgctgagagaagaaaaagtacaggacccatctccatagcatttcaaatcatcacagttctttcttcttttgcttgcactgtgtaagtgaatatgcatttcatgaaaaagaaaaagaaaactacaaccctccctgcccccagtatctgagttcattggctagctggaaggtggaagcaataaaggcaaggggaataactcaggcaatgtataatatatgctttggactttcagagccagtaacagtctctccctagctccaattcccctatctaccatctacaccttttaagaccacaatttgttaatttctaaaataaactctctgaccttcagtttaataaattcccctcctcttttagtatttctatttttgtgacaaatatcctcaaaatgttatatatacttaacacatgtttgcaacaaattctaaacacattcagcattcctgtctgctctctgttctttgttttaaagttcatgtagcatacatgtgcttgtgtgggaatagtgtttgttcaagggaatttcccagccataggaatatccatttgtactctgaaggctgctcaaccctgttcagcaccatagaacctggaattactttttgccacatttctgtttattctcctctatcctagaatgtaggctctatgaggataagacactttctatgtgtctgttacttccaaggcagacagcagtttctggtgcatattaacgacccagaatttattgaattacacaaagagaataaggcaaaatttttagcatgtctgaatttgtttcttaaaatttcccagacatcttattattaatcttttataaacacaaaaatgacttgttattgtttacagtctggaattgatttactgcacgaattcctgtgccctctgtaacctctgctttccttgctggcacgagcccttggacagactttccggtgagattttggatagtaaactcttggttttcaaattctgaatacatttatctcctctgttgacagcctcaatttgctgttttcaagatacctcttaactatttattccttgctgttaggataactgttgtaggcgatgcatttttaaggccaaatttttggtatttatttggtctggcacttgtattctcaagaaaagaccatgccattctttgattctagaaaactctcggccattgtttcttgaagtaattatctggctttcctgaacctttctccattttattcttacaacatccttcttgagtctctgtgtttcccatgtgtcttcaaaattttctttttgtgactcataatgccagtgaattcctcagcaccttctagaattcattcaactcatgcaatttttcttttatattccagtgattagctacttcagttttctccatgaacactcaatataactgttgctctaatttttcttttttcagcagatctagtcttcctctttgacacttgccttgtgtgcttagggggagtggcttgtctgagaagatttgaagagattgtttcctctccctttttttggtgtagttattaatatcatgttcagtcattctgatgcatatacattctttcatggtgtcaccgagtttcttcaaggtggtaacaccaaagatactgtgctgtaaatgtaatacatgttgcccagtgtggtctgctttctcctaccatgtctgatgtcagcaatatcctagggcatccagagtagctatgtgcagagaagcctgcatcctgcatcagtggccgtgggctttggcttggtactagtgccccaatacgacatgactattccctgttaccttgtgcagagactcatctgttcatgcatcatccctggctgccctgttcccacttcccctccaccatcatgtctatactttacaaaatagacttaatctttttagaaatatttaaaattcaaaactttaaactcacagcattatgctccttaaactatagaaaaattcttacacatttgtacctactttactgccttatttcaaggaattggctttgggtctcttctttctacattgtctgtcacctcttataaaatttatgatgcatctgtggttgtccaaaggatagctactacatcgttttaggtagatttatgaagcatagcataagttgacaaggtgtggacttgtcatagctattctttgtttttagcttgaatacatcgtggaattaagttttaatactcaaatcatcagtgtcaggggagactgatatatcatattcattctataagctttacatcttgtgtttcttcagagaacccagactaatacacgaatgtacccctcagtctctaccactacctttccacaacaagacttctttcagtcctccattggtttgtatcctgaagtttatgacattcttccttttttaattttttttttttggtttttttgagacagggtttctctgtggctttggaggatgtcctggaactagctcttgtagaccaggctagtctcaaactcacagagatccgcctgcctctgcctcccgagtgctgggattaaaggcgtgcgccaccaacgcccggctgacattcttcctttttttaaaataaatatttattaatgtctgtatcattctagaagccagagagaccagtggcaagggatgtcctgtagcaagtagctacaaaattcatatatgattactagtgagctagataaataggataatggctcaaggtgaagaaaaacatagagaaagatttacagcggatatagtattatcagtataatatatatatattatatatatatatatatatatatatatatatgaaatgcaaatttatatcaataggattctagagcctgggaagtccaggatcaatggaatgccgctggtgagggcctgtctgcttcatctgaccattgcagaatgcattgcagttatttgagatgacatattttgatgcatgtgactatgtttgaacaagaatgggttcaatgtgtaggcaagaactgctgtaaagcaaatcttcatgacagaaactgatagatattgtgatgttaataagcaggttctaagatcacttaggagacaaacctttgagcatgtctgtgagggagattttagacccggtaaactgggataggaatagccaccctcaatatgggtgttacgataagtctttcctccaaaagccgcctgagccccatcgccacgtgtgagccacctgcctgagttagggcccaaatgaatacacagagacttgtattaggtacaatgctgcttggccaatgactaggattctcatctgttagctcagtcttaataatcatacatctatatattttataagacttatcttatcggacaccttattggcatccctccttgccagtggatcacatcgctccgctggaggaagagcggaggggaaaagaaggacgcttcctgtttctccttcttttaaatatgagtccccttgctatgtcacttcctgcctggatcaccacttctctgctacatttcccagaatcctctttgactcctagtcctgtctaacttgctgtctcactggctaaacagtattttattcaacaatcaataagataaacgaacattccccatcatatgggcatcaccattccattggctgaggttctggattgactaaaaaggagaaaatgagttgagaacaagctctcatctttttttttctttttttattcatgaattcggaaaccacatgacccgttacctcattatgctcttctaccaatgactgtatccccttgaactgtaagccaaagcaaacacttttttaagttgcttttcttgggtatttctatcaaggcaaataggaaaagaattaactaacattgccatcaaggtcatttccacccgtttttgaactaagaaccttggaaaagagggaggaaagtgggtacatcttcaaagcaggaacaattaatagtgttggcagttgaatcaatgagagactctagggaaagtgagatataaaggatgcatgctgtttctgaggatggaggctctgttccctgagatggataatacagaagaatgaggagtttggaaggacaagatgacaagctgagtctggtcttgcatataatatattttacaatatagtattcaattgaaaatggatagtggaaaacaaggtagtttgttggagcttagataagaaaacaactgtgtgaaaagaatcaatattttatcagaatttcttactctgtcaagataaacttaagtttcagaatcccaagatgagtgattctcatgctctttgcacatgtgaatgtttagattaacttatttccctctcctctttcttgacaaagctgatcatgatgtctatattttctaagcatgcgtacaggatattcacacagtgacacagaaatattttattattcattttattttcatataaattaacattctaaaaaattgaaatagaaacactaaaatacaatattgcacatagcgatctttgttaaatgccctattacttcattgaagagtggtgatatacacactggaaggactgagggacaggagaactacaaaacaacaacagaagaaaagaaaacactactgctcctttgcacttcaaatacaaagtagaaggaaagaggtcagaccttctataaatacaaggatagctatgatttagaacatgatttatctttttaagttgctgtccataactggtttgcaataacaataatttctccccttttctataatcatatctttcaaccaatattattagcagcaatttaaaagaatgactattccagttatacaaaacccccttaatgcataatgagctgacttcaaaatatcctcaggaagaatgggaaacttactgatttctcctgacagtgagtaaaatccttccccagtaccctttagatgcaggatgaaagcatccttacatcacatggtcataaaatcatgtcaaaatactcaggcaggtatttttttacttaacaaggtccagatagatctgatcgatctttattttatgataaacatcaaaaataaatctcaatttcatgagcttgacttattcaaatctcttgaaaatattaagtgactcttgtgtgtgtgtgtgtgtgtgtgtgtgtgtgtgtgtgtgtgtgtgtgtgtaaagtatcatagtaatatacaaaggaatgtcttttgatttcatttacctctgctgcagagcaggctttcatatggtctcgagggacataatatagagagcaacttaagaatgggaaagcatcagtcatgacatatagctactacttacttctcaaaataaaaaatgtgaaagtagaagtgaagtagatacaaagaattcaccaggaataacatttatccacaagtctagtcacacggatgtggagttctggttgtcagtagaaaggaagatgtttttgttgtgacaagggagaaaatctcatgaaaggaagccgcaggataagatttagcatgttcagagttagtatgatagtgctttttagaggtgccgcttcggtctctggggataacatcagaacgtttacaaaaagaaaagggtcccaattcgccacaggtctactgctgctgcaattttaaaagaacatagaagaaaattcaacaggcaacaaactttctagaaaacatggaagattatgcaagaggttcagagggaaaatgatcagaatggtgtggctcccttccctcctcaggtcaggtggatgctggggaagttgctttgttcttctgctcacagctcaggttttcatgcttatctttgctttctgaaaacaaatataccaggtggggttaaaaaaaataaaaaggaaggagtttagagcagaccaaataagatctttatttctattaaattctctggataaaagatgaaagatcaattcattcaagaaactttacacacattacatcagttccatcttaaaatagcttttagtaaaacaaattaccaaatgctttagataaaatgagtctttcaagtttaacttttgatgtatgtgaaatggggttggtacagctctgtcattccagagcctacatgaaaaagcatgaatacggaagcagaaccagtggattgatttcacggttggcaagttttaattctcttccatctaacagcatgagcaggggtagctaataattattcctcttattcagtatagatttattaagctttgatcagaaaacaccaaagacgaatatatcattagataaggcaaattttgatacagaaaaactgacagaaacataaattttatctaaagatagaactaatttttaaacagggctatttaatcctaggcagtttgagttatcctaattgtccactccatttagactatgtggtactaatgtattcaaaatgtttcactttgggccggagagatggctcaacagttaagaacgaccttcactgcttttgtagaggccctgagttcagttcctagagcctgtgtcaagtaacttataactctttgaaactctagctccagaggctcgaaagcccttttatcactgcctcaagtacctgtattcacattcacataaataccataataattaaaataataattataaatataaataataattaaaaataaatctcaaaattatttcatgtgacatccaaaatttcaatttaaactagttttatttcttaccctggcaacaggggatgcatggcactttcaaagccttcaacaaaacttctccagtaccagaagggagaatttgctatagtaaccaacgtttctctcagagggtacacaacttggtgttttattgtaatggaggactttgccaaggggaatcttagatcagtctctgggtcatagagtccaaatagtctacttgagagcatatgtcatttccttatgagttttatacagcaaatctgatattagcattcagggttaaagtgcataaaatagcccgtgacttatgtattatgaagtacggctatctcctgccccaagcagtggacacaggccctcacatatgtccatacttatctttatcttaattatgaaatttcaaatacccaactttaaaactaactcaactacaaagtcctgattaaagagataaagaaaagagactgttggaattagaagctcattatttatccaaacataaggcaaaatgactgaggcattattatataaacttgtgtacattgtaaagacagggttcaacaacaaagacatcacaagttaaaaacaagaatagtcaatacttacaatcccagagtcgtgtcttggttttactttatagagtgactttcctttcttctgcctacacacttcctcagcttctttgactctgagtagggaagaagacaactaatttaaacaggagcccacagtgaccacagagacctactttatagcaagggggcaaacttcaactcattaaagatttgaattattgggaaacacattcaggaatgccgcctcacatttgattttaacatagaaaggattagagatagagaaagtcactcatgtgaggctgaggactccaagatgggttatattatataaatgtaaaagggatccattactgcaattagaaagaaatatttgcataattaagaatgatcatgcaagaattcccatgaagatttaaaatgacgtcaagttcattttctctctaccaaactcacctacatataaaagacatttggaatgaaacttctgggtagttccaacagctaaacttcatcaagcatggaagcaattatcatttacttgatgccaaagaaaccacaacccaacaaccaaaaaccaactgcaccgtgatcaccctttctcattgtttaatgagatagagcctcatggggaactcaagttactctggaatctacaattttgctgcaacctcctaactactgggattgcaaggatgcaccaccactccaagaaacatttttaacatgtttaagatttcttttttgtgtatacattccaaggaaaagtacactatgtccatgagaagcattacctagaagaacgtgctgttaaagatgaattttgcattaattcccttgccgtagaacactgccaatgtcctttcacctcttatatagggacacttttaaataataaaaggccaccatcacgaaagcattatattatgattacagaaaagtctttccaagactaaagactattttgttaaatcatttctttacaaattacaagatattataagaagtcacaactgctttttattaaagaaatcacaataaacctggaaagtaggacttcattaataataaaggggcacagcatagaaagaacatgatctatcagactcctttatttcttactcttgtgatttttttcttaagaataaaattaattaaaatacgaagtgtgtcgggagaaactgaacagaccgtggcttgaccttaagaaaatataccttatgttgcttacatttcttgaaagaaacaaatcttgaatatatttcttgtgccctgtggcaaatgatacagccacagaatttatctcctgtgtaattgattcaactttgcttaaacgatagaatgacccactgatccaggcaggcgtctcaagccttatgtgaaagtaattcctgttagatacaaaatgctgctggttgggtaaacagtaattccagaaactggtgacagtttagatactgcattgttaccacttttattacttccccaccaagccataaattccatttaatccctccctaaacatctgaagacaaaaacattttctctataacaaaccaaggatttcagagtcaccatcttcctctgaaaaatctgccagtaaatttaagcttgaagtatttggatagggaattagggaacttttttttccttcttcttcttcttttttttttttttttttttagcacttagtcaaaatccagtagatccccttttaaattcgcttggtattctttaaaacatttcataacacacacaaaaaaatgtacttcacaactacttcgttccccaaagcatcgtggtgttcgctctgctctatttgcagcagtctcagaacatatcttggttaggatcacaggaagctgattttaatacaaacatatttaattttacatgaaagaaaatccagtcattccttattgtagagcccatgacgactggagagagtgtgcgtcaaggtgacgtcacaggatcttttagagctcatttgttcatttgacaaacatttgtggagcagcaactccaggtcaggtcctggtgcagctcgggtttacacggacgattcaactcaacaactagaggccagaggcatacaagagcagaattacagggtttgctgtgggcacgggtggtctcctgactttgtataaggtcccagaggaggcttctgcaattggtattcagggtttacacaaactattcatgagtatcttgagggttgactcttattttcaaacaaccaaaaaaaaaaaaaaaaagaaaaaaaaaagaaacctccattgttcatatttttggaaagagaaattgttatcaagggtgaaacaaaataaatacaaaacataaagtcatacacacaatggtggagggaaagtccacaataccatgctgcgcttcagaaaaatgagtagtttgttcttctcctgtcatgggatccctatgaggcaaatgtcgcaaatgctttctgacctatgcctgagtgcctgtgtgtccatcgtcttctcctaggctcctcaagagatgggcacattaatgcattagtgagctggaaactggagcaccaggaaaagcagattgctgtcctacttcacacttgttccacagaggatttgatttaatgcaagtctccaggtccacctatatttttggacccagtccctgtggtccaaatacagcagatgagacgatatgatgacggaagccttaagcagctcttgagaaacagtgctctctaactagggtcagacaactctgcctcctgagccctctccttctacagagttcctctaaatatgttcacctccatccccagtgattcctgccacggctgagctgagtaactgctgctccttctaaatgccaactgcatttcaatataaatcccatagaaatacttccccttcacacttcagattggaaaaaagaacatgtccctggagttcagaattggcaagaaagaaaaaagaaagaaagaaagaaagaaagaaagaaagaaagaaagaaagaaagaaagaaaggaaggaaggaaggaaggatgaaaggaaggaaggaagaaacctacagggcctctttagtggagtagtacttatccctggactttaggagcccagcccatatggagggataccccctgagcctagatacaaggggtttggcctaggccctatcccaaagaatatgacagactttgaagaccccctatggatggcctcatcctccctggggagcagaaacggtatgggatgggtagggtgttagttggggggcaggggggaggggagggagagggacctgggattgacatgtaaaataattttctttctaataaaaatgaaaagaaagagaaagagggagggattgatggagaaagggaagaaggggcggagggagggaaggaggacctaaggaaagatgacttggggatgtgcctgagttgtcagtgtgatggtctagcatgcacaaagcccagggtctgaccctcacccagtactctggtacatacctataatctctaaactgaatgtttagtcaacctgttaatgatggttgtctcataagaagataaaaccaaaagaattgcaagatgggagagaaaagaaaagagagaaagcaaagcaaagaacgtgagacagtaatgaagacagggaaggaaaagttggtgaagagtggcccaagccaaccctctagatcatggtcttcccagttgagctatcagcttacctgtcattttaggtctagtgtgtaaatgctgggggccttttagctcctccccatccctggctctccccctcactcagtgaagccaaacatttccaaagtgattaggggaaagagatgctaagaagaaacaacgtgtcaagcaatgaattgaaaacatcaacttcaacattgtactaattgggaaggggaaggaaataaaaggagacagcaggtactctgagaggaaacactgactaaggaaaggcagaggtccactgctttcaaacattgtttacaacggagttcaaccttcaggtacctctttctcgaagctcggtaacattttgggatggcctatgaatattgtggagaggcacagaaggatccatacatgattaatgaagatctactcttttaaacatggctacattcggagaaatgtgaacgtgaactgccaagatattggttaattgagatttcactttcttaatgaactaaaaagtgacttaaagatattaggatgaaatccatgactggcaggctaattttaaccatcatgacaccccatcatcaatgtagacagtagaaagaaaatgtatgcagatcttatcaccggataataaaaaagaaagccctcattcatcatttttagtgatttcagaaaaaaaaaaaaaaaccagaagaagcagagaccagaaaacaggaaatagggtgttatcttttaagaggaagaggggatattagatggcagataatggctgtaaaatttaatgttgatatttctctgtaatccttgtctatgaagcttcagaaacaaaggaaactatgcatctctgcctaaatgtccaaaatctatacttatttctcaaaaataagaacaggcattgtcacagaaggactggcattctctatcttttaagagaacagttgattacaactagtgaccaaaatacacaaaatacacaaagaggaggtgaccaaaatgagtaaaatgagttttgctaaattttttttttttttgcttaaagcagaagagatagggagagatgggggagagagggaaaacagagacacagatagaaacagagagacagagacagaaagagattgagtgagatacacccattggcatcctatattcagcactagccacatcaccatggcaacataccatgatacagagccatcctccagaggcctcctaaggtacacaaggcactcagactttctgtcctgtgactaactgtgtacatattggatattctctgtttcttcctaggatgacaatgctaatctctccccactagagacagaaagcctgcctcgggctttaccacttctaccttctttagcagagacagccagataactaagctggttcaaagggcaaccccaattataacatcatgaatctgagtttgacatcaagttaaagaatggtgttcctggatctacaggaaacctttctagctgcttctcatcccctactcccacaaatgagccatatagctatatctgagagggtgaggggacggacccagaagtctgacttatagatggcatcagaactctgttttgaagaggaaaaacttctaagacattgcaaacatagatggtattgtgtcgtgcaaactgcttattcatggtaaaccctaaacatgagttcattactaaagataggaggagatactattatattttgtgttcgcatgaatgtctatgttggtttatgcatgtgcatgtgtggctgtgtgcacacatgagcgctgatgatcacgcattgtgtgtttgtgtacgaatgcatctgaaggccagaggttgacctcatgtagccaccttatttttgagacagtctttcactgaaagtgaagctcactattccgccaaggctggccaatgggcttcagatatctacttgtgtctacctctcccccaccctccactattaatttatagcgacagcttgtggtggcatagagaccaatagacagggggagcaacagtgcttttgatgatgaatagattatcctagctgcaaatccaatggttttctaggtcccacaaaaacctactaccaccactgtaaccaaaacccatacataaaaaagcctgccctaggccatcagaaaaaaaaaaaaaaaagtcctgaagaacattatacaaagattgttaattacaaagctgtagctggaatttacctaaaaactcctacatgaagtttattatctcaaaaataagattgggaatattatctgaaatggagttatagacttcctacacatgtagatggagtttgcctctttcctcacagagactgtgggtggttgctgcttctttggggtttagtgcattaagcttaaaagttattacataaataagatttcaaaccaggagactggaacaattttaaggtttacaatatcttaaagaagacagataaaagcaagagaatatggaatttgttcttataggatttgctaacattagttttaaattttcatcaatttttatacaaatgaaaacccttaaactatgtccgtatgaaaattggattcattttttgcattaagtgtttctaaacaaagggaatggcttttcatatctgttctaataaagatgcatttcccacccctgaactttctctagccccagggccatttattgtcaggcaaatatatacaaaacattcagtgtagttaagtttaaaaacagtgtgtgagacgaacagggagacagactcagatacagacagaaaagagaatccagacatccttgtagcctggagacagaagaacctctagccaccttccacaccaaacgccactctggccacagtcttatcaagaaaagatacagtgtcatcattcaataggatgggaaaggcggctgctttccagtgctaaacattaataatttggtctacacaagtatctatagcagacagttatgtcccactggctccagctcagctttctgtgagttgctgctttcgctctgggagccaggatgtttgtcagtgagagagctttaggctgagtctggggcagacatttcagaggtctgagatccccatcatggagaaacagacctagcaggaagctaacagcacatgcgcgtgtcattcccgccacttcagaatgcactttaccaaaataataacgccaggtctgcctacaaattaatttatttttcaacttaaaaagtggtaaacatgagaggcagaggttttagactatggttggttggtggtaatggcttaagactttgggggctctttccgggtagagacataaaaggtatcagatgtcgtgtggaattagaggttatttaaggaggtttattctgtcgtatctcctttgtaacccacatgatctcaaactcgcccatacaaaaccatgaagatgtgagaaataataaaaatgacgaccccagagtttcggaccatggagaaagcgtgtcagcctcctgcagcatccattcctgagttgcatgctgagcatttttcagcttccagagaaaaactgcactggcccctccagtgtttacagaaaacagtaagaatgagctcaagcagattctcatagaagaaaaccaagcttccatacactcctgtactgctagaagtcacagtccaggtagcagggatgtggcacgttaagggacacaaagtacaaaagggcttcaggtccccaggggtctggcccaaggacaaggcagccagattcacacagaagccacacatcatactctgtctacctgcacccaaagaaagtctccgtttatctcaacagcggacactatcttttggggaaatctcctaactccagtcttaatttgtgacagttggatagggggctctctgcgactcttcacaaaactacacatggattttcataaacacaagaaaatgaacagacatgaatattgccaatgtttactgagagtatttctgtggggcatatacaggtcaaaagaaataaaaggatatttatttactttgcttctaattgtgtgcatatacgaataagttgtgtgtgtgtgtgtgtgtgtgtgtgtctgtgtgtctgtgtgtctgtgtgtgtgtgtgtgtgtgtgtgtgtgtgtgctgatttcatgtgccttcctctattcctctctcccttactttgggggatgggtctctcactgaacttggagctcatcacttcaagtagattggccgcaatttgctttagctacccaccctacactcccaatttgcccatctctgttactcccagtgttagggttacagacacatatcctcaagttcaacgtctaacatgggtgctagagtaccgaactcaggtcctcaagtttgtcaggaggtgtgtttacagaagcaggatgtcatttcatgtaattttgtgcaggttctctttcaaagcaaggactatggctgtttatctcttttctgcttgctgaatattaagttgcttgagtttaataatcacaggtagtcatttttaagtttccagagctcatctgagccctcatatgggtcattataccactagacacttgaaaaacacttgagttacccatgataaacagcagaggttctaaatagggcttggactaatgcctcttggttatgtatctcttctggatttggcttgaccttttagtttactgattactgctacgattctatctttaaataacaattgatttctagtgaacatatacagaattcagtcataagatagcctaaggtatttttccacttcagagggattcctttgtggtctgtatacagtgataggaccacaaggattcatggcaaatggcctcagtaactcctaggctataatgtggattcacttccacaaaacatttgaaaaatctctcatgggatgtcggtggactaattacagaaagatgcttccttgagaagatgcttggatgaatttatagtgagggaaacaggcaacttcatagatgattatgttccttttaaatataactgtattttataactcttaacaaacaaaatatatcattgaaatctgaaaatatttaaaaagtaggtgtctatcatttggaagagtagttctgtaattggacacatttgaacctaaaaagcaaacatagcaacagaagtgcgaccgtctccaggcagtcattttggaaatgagaactggagaagacaaaataatcactacatatttctgactctactttctaggaggtgttttttgtttgtttgtttgctttttttttgacacagctcttttccaagtaaagggtgtaagctgtagttaggaaaaatgcaaaactacaacttacagaaaattttaatgaataactttaataaaaacaattatccaatctcaacagatataaaaatttaaagttgaatacagggtgggtatttctgagtagacaaaggccaataaaaaccctaagtacatacatacatacatacacccccacacatacatacatgtaacaataataatcaaagaatttattaacttgagaggcgtggacatgggaaggattaaagggagagtacgtgggaggggagggaggggtaaaggaaggggtgaagtgatggagttctcttttaattaaaacaaacaaacaaagaaaccagaacactgaaaaatccagaaatcagataatataaatattctggacttaaaaaaatgaaaccaaacaaaccaaaaaacagagagggctgaggtcttagacaagctctggaaatgccaaccatccatgctatgaagaagagaataaccattggtctagggaatacatgaacaaacgccaagctcatgggcagctgtgtgtgtaaatgaaggcccctcattctgtaacatcaagctagagtatcatttcacattattcaacatggaaaaaagcctatcaagaaatctgaagagtacgatttcaaatgtttccataaattctttttttcttttaattttattcttctctcataaattacatcatgaccacagtttctcctccctctcctcccctacctcctcctctttcctccagatccacaccccctccatctcccctaaaaaaaagaacaggctttttttttttttttgaggcaggttttctctgtgtacctttggagcctatcctggcactcgatctgtagaccaggctggccttgaactcacagagattcattcatctgcctctgcttcccgagtgctgggattaaaggtgtgtgtcaccaatgcccagccacataccatctcatgaaggctagacagtgcaaccccgtaggaggaaaagggtcccatgagcaggcaatagagccagccccccccacctccacccccactactcttaggaatcccacaagaacaccaagctacttagttataaggcatatgcaacttcctttttaattgcagcactaagaatatagaaacctatatctcatgcatgctagttaggcatggatatcctcctagtttcattctcagtcatttaaaaaattacttctaaaaccattctatgttatgtgtgtgtttgcctaaatacatgtctgtggaccaggccagaaaacggtactggatcctttggcatgagagttacagatggttgtgagctactatacagatgctggcaattaaacccaggtcttttggaagaacatctagtactagtaaccatcaaacaatctctctagtgtcctcaaccccttttttcttgtttttaaactaaattttgagatatgttcttgctaagctgtctggactcaaacttgtgatatttcctcctaagtaccaggacttagacgctggttatcacacctagcttcatcccgttctgtgataagcttatcagagtgtccacatgtatactgagatgtttaaacttttcattgcatttcccaccattcatattttaatctctgatagaggagacataattgttttgctttcacataagttttaaatcacatgacagatttccatgacagcccaattcatgtgtcctttccttatgtatctaagaaagaccatgtggcattctatacacactgaagaaattttaggttcctttaaaagctagaaataatagtgactggtataagaagcatatgatagtaaataaaacaaatcctgtcatacatggtagcctcaaatagtaatatatatatatatatatatatatatatatatatatatatatcaaagttcatcttttattacaggaaaagcatctgttctgatgtatctgacacttttttcatttttaaagatttacaatattattacatttccccttccttttcttccctccaaacccttccatagaccccacacatttgttcacattcaaactcactacctctttttcattgctgttacatacacatgtacatacttacatacacttgttacatataactaaacacatgtatgtaagtatgtaacatgaacacataagtaagtgaaaagttgtccaatccatacaatgtcccttaggccaagaactacaggcaactaagagagtggaagaaagggtcttctccagggaagactacatcaattggttattcaatacatctaatactcttcatgcaaatttccttttactatttctacttgtgataaggtgtgtgtgtgtgtgtgtgtgtgtgtgtgtgtgtgtgtgtgtgtgtgtgtatgacagagtgtgtgatgggaactgaactcaaggtctcatggatgctactcaaagatagttttgtttgtctcatggattttttgttttttgtttttttgagacaggttttctctgtattgctttggaggttgtcctggaactcgctctgtagaccaggctagcctcgaactcacagagatccacctgcctctgtgtcccgagtgctgggactaaaggcatgtgctgctaacacccagcttctcatggattttttaaagcagttcagaaaagctttaaccacagctagtgagataggaagttaaactctcttgggatgtatgttgtgctgctcattttgacacctgtctagcaaggatgatgtgtacaaatcatttgtatcttacttgctgatggacttggtggggatgtgaagggctattagacataggaattagattatggtgagtttatccaatttcctccccgtaaaactcataaaaagagcacaacagagctatttatatcataatggctcagaattgcacaagggaaagaatggcttaattaagactaaaatgtgggagattcaaggcagagacagatgaaggaagcacactcactatgggagaattagtgtcttaatttctcctttactggaatattcctatctggttacaaatatgtcctttatcctaacatctgaaaaccaccaaacctcagaaaacaaaaccttcctatacctccctgcaccctgctcttcttttcactaaggccctttgaatgaacaagttccttgaaactgttacctctggtcactgtctccattttctctccttccatcatcttgatccctaagcagtctcagagtttgcagatcctgcagatcaattgctagtcttcgtctccctctaggtcacagagccatgtcacacagggatcttactgtgtgcccactcttctcacaccttgcctgaatgtgttccactagatgacacttctgatcccagcattccttccccaagctcactgatctctcttgcttgattgctctgttccagccactctggacttcttactaaatatgctttcccacagcttctccatttgctattcccactgtctgtgatttttcctcctccacatttcaagtagtttattctctaattaccttcaagtccctgcttacacaccaaccacttctcagacaccatctggcttacaagaaccaacatcttctaactctgtctttccttgacccagtaaagacttctttctaactatattggaagctccatcagggtagagatttgctgtttttgtttgcagttccaatcatatgatgaatgacctaagcaaagtgtgttggtaaattctaaattgagagggaaggatggagatacagtattcaggagacagaagacatcagtaatgctcttgtggataatgactatatatggaaatgaaaatttgaataaaagcatttaggactcccattctcccatgtcttccaagctacatcttgtgctccttaggaaattaacctatagttgtcctgctgacttgaaaactgtacctcttagagaatttcctccagagcaaggagggtgaaaagggttacccctgctgatgatgcgggaaaagcaaagaacagtgagatgtgtgatttgttaataatgtctggacacagaaagcaaaggcagagctgacaatataaagttcagactgaataggaaactaggtgtgtgagatgcatcaaggaaactccacaataattacataaatgaggatgtcatgtcagagcagtcgagaatctgcatggatctccacagtgaacctcacacatggagtttcataaagagactgctatacccccatgattctagatagaacagggggatcagtacctgcatagttcactcaaccaatacgaattcattccacaatcctttacccaaaaactttgtagccaaatactccattatttatattagggaagtcattaaataaccaagtagagaatggaaatagtctataggaatcaagtctttggatatgagaacttagttcttagcttttataaaatcagaatgataaaacaacttgcttccaacaactgttcatgaagacaggctatatagtttatggaagccagcttatttccatcctatgatgacccaccagctttccgatggttacatgcctgcttctcctcagctgagatattgtgtataattcttggttctcatatttttcacctgcttgtggaccagtctactggattatactcagtggcagagtggactgggggaattttatatttactgctgagagaccaagtagaagactaccaagtaggcaacagtcaaggctttatgtatggtgatgctgccttctcagatgggtttgcattcttcttaaatggttgtgtgatttccagtacccacccatccatccatccatccatccatccatccatccatccatccatccatctttgcaaaaccaattccctcttcagcactataatctaactcaccattaatgctatctagctcccatcttactttctgctttaaacagacccatgttgacttctatgtcaaactccaaattctgtgtttctagttctgttcatagtctggcttaagttttaaatgagaggattacaatgtgcaaagagagccaggggttcaatctttcttctttaaaggtctacaatttagctctgcactaaatggggatctgtaatatgatagactgaaatccatattaacaatcgtaactagctggagtgaaattggctgataaaaagatgaaaagaacaaacctgcataactgctgtggattcacacaaaagaatgctcactcaattctttctgtagaactgggtaccatggaaacatacttctgccttagttgtaccattatgtataggtattgctaattataaaaagacaatatgggtttcctggcagagaagtgatttctagcttctttgtgttctctgccttctattttaagccctactgtctatcttaataatctcattctaacatctatgcttcactcccactcttctgcttttccaaattctacttcactctgtcctgttcatgggttgaaatacaatgtgttcatacacaataatagccagaatatattttggctttttttttttgagtcagggtcccaccatgtagccttgactgccctgaagttcactatttataccacgctggcctcctatacagaaatctgcccctgctttcctggtgctgtgagtaaaggctaacaccatcaaagcttaccccagtagcagtaatttctaaagacctgtgttactattcaaaactcttagcacctgcaatgagtcattcactgtgttggaaattttgcagctgatatcatgaattgcttcaataccatatccttttgagatgactatttcagttctataagttagaaaataatggcaattaaacttaaataattttccagtttcaccattttataactggcagcatgcaaattcatggcttggaaatacacacatcagaatgaatagtaggtaggatacagctgttctccgaattccaatgttaagtttttctaacataatttcttgcctttggaacatgaatttgctaatgataatgttatttgagaagctttggtatgagtgagggtatgctaagcattttatattcagtggctcatttaactcactcctgaaactagataacatcagtaccaccaatttatgaatgggaaacctgaagctcagagtggtaagccaatatatcaagggctgtatatgtactgctacaggcatgtgttaaagtcttctacaatgcaatcccatgtttctaccgcctattccatttagtttttgtaagaatgaatattttagaagaataaggcactgtagaaaaccaacccatgggtgacctcaagacagaattatgggcacatcatcattaaaacttaaggatgcattaatagccacatggaatctgacttaaaatgaaatcctcttgtgttatctgtgagcatcaaaaattctaactgatgaaacatacccccccatgtctcatcttatccacctcccccacactttaaagtggaaaactttaaagtggccaaatgtaatttaaacaagctttccaaaaatgttcaccctaggcctaagaatttgacccctagaggttaattttaaaactgatcccatctaataaaattaagatctattatgaatacactctgatgtgcatgacttccacaagatacgcactgtctagatccatgatgataactgcaaaaatttcagggttaaagatggccagacatggtgtgcatgtttgtaatcacagtattaagacgcagaagccagaagactgtaagtgcccagtcatcctgtgagacactatgtcataaacctgggagccagggatggtgcttgcagtagagcacttacctattaaatcaagggttctttccttttcctcacctaaaaatgtttacagactcatgtccaatgcattttttaaaaggtaaaattatgaggaataggcattcccatatataacctttaagttctgactaatgtaattgaagaaaaagaatcctattttatatgaatattcattacttatctgataaaaagaaatgtttatttaactgaattttgattttcaacatggtagtcaatgcagcccacctcagataccaatattgtagaatagattaaaaataacattagtagaactaaattgtttagagtaaaatatcaaatcattaatataagtgcgtattttcttttttaaaaaaaaaaaaatatatatatatatatatatatatatatatatatatcatgtctccttattgaatgttgtcctaccacagtgttattcagatgatgttaaataggtacactttctgtagctcagtacttttgctccctcctgcttcataatttgttggagacaaaggtcattttggggttaatgaaactcaagggattcatatactctcaggagtcagcaagtgaatttaatgtgggctgctggcttttcctccagggaatgctctgataatgctctctcctggaaccattccagggcagaaggacattgagaagtccaagaagagatggacacgacctcatggtactgtgtcctttcagtttatagaaaaacagctataggctcacaaccaacacagccagaattctatgttcattaagagtatcaaccattaagagtactgggtgcttttccagaggacagaggctcagtctccagcaccaaatggtggctcataatcatctgtaactccaatccctgatgtcctcttctgtccttcattacaaggctcaccagggttgcacagaagtacaggcaagtaagacacccatatacattaaattaaattgaaaagaagacctgctagcaaaaaaacagtgttgaataaaaacctagaaataaacaccacagtgatggaatgaatctgctagttgagggtgctttggctccagcatgccttggctcctcctttatcttagcttccctttgccgggtagaacttggagccatctctactcagatgaggacccaaaccaggagcggtctgtgcccttatgcagatgtggaggtgacaactgttaaggtgagcctccctctgtaggcatagcttccctaaccacacttcagatggcttcccatcaatgttaaatcattcagggaaggtctacacaaggagacagagctgtctttctttagagcagagatcaatgagctgtggagacgtgttggccagggaccctgcctttgatagagacaggctgtgtgatacttggtgccagctgaactgcaagccctaaaggaaaggggtggctggggggaatcaattgcaggtggatcatagccagcgcaaagtggagaggagggaggcagagctgatggattatttagaggatgcttcatatcaccaagatacaatgacagttgaggctggctagataaactttgcaaactcggaaaggttttgagggatcagggattctaggtgtgttatcacagactttatccaggaagcagtggcacaaataagtgaaaacagaagcaactatatataaatactcatgagattgaagttaaaagatgttaaaacataatgaggaaaagaccctctagagagtttatatgttaatctgagtataaattagaggggctacaatgcaaaaatgcttttgtaccaattgaaggattttattagatacaattgtatattcatttatttggctttgcattttaactcttaaaatgtaaaattaaaactatacaacttatggattattgttacaaatgggaaaatatcaatgtaatcctgtgaggtgatagatttgttaattggctagattatgacaaccattattcaggatgcatacagacaaccagacatatgtgtgtatatgtatgtatgtacatacaatttgtcagctatccctaaataaagccagaaaacattgtatatataaaaacttaaacaaatattcaaaatttgaagttcactttcaaataggaacaacagtgttcccataaaccaaaaaccacaagctatctgtgtgacactaatttgtactgagggctatggttcaactgatggacatttgacttgactgctaatgtcaacagccaagactgaactgtaattttatagctagttcttcaacatcagcaagattaacttccatggagtgcctgcttgctagtaagtacaatattctttctctactggggcctttctctattactgtttgcctcatcctcctccaaaaaaaggccccaacaaagaaaaaaaatgtcttggctctgctcgtcattggcttcatacagagactagtatctaagacactgccaagacgaccttgtccctctgtgtctctcaagcctagtttccgattgtatctctcaagcctagtttctgatcagacattatttattctacagccctaatttttaggtgcagaagaatcagctttgacttctcaaacattaacacttccaacagcaggaaagcagtagcatttgagaggaaatccctgaggccgatggagaagtggctccttccttggaattcttcaaccccaaggagtcagagtcagcagcaagcagtgttgttgcaggagggcctgtggagagcactttgattccaaaggttttagttatcttaaaaattcaggctccagaagaagtattcgcaaaccaaaatacttgctaactttccattacacaaacccaatggatctgctcatcttcctgtaacaggacataactgtgatattacttaaaattgtgtatcttaaaggaagtgggaattacccccttaaaaatcttgcttttataggagcggttttcagcccatataagttaaaagatactatttttgagggataattttgactcacattttccaggaagtatattttgatctaagatatttctactgtaaacttagctaaatcatcaaaaatacttttaacaaatgctgatgggaaactaccaatggctcagatagctcccaagctcccacaaactcaaagattgtacagcatttaaatacccactaaagcaaaaatacctccggacaaactggtttcttggtttggggtgctaatttcctatttaggtgctttagctacaactcttgagagctgctttagcttttgaatgggaagctttccctccaacccttcctacttctgtcccttcctgcccccatctcatccctctctccctctatttccctctaggaacttgagcatgctaggcaaacaaactgacactaacatatagtcagctcacatgctttgcttttttctttattccttttaatttttagggactggggatagaactcaagaagcatttgagaaaagtttccccaaagcacaggcaggacaaaaaccaatataaagttctttcctgtttagatgtccgcctgggatgtccacatctttctctgagaactaaactttaccaagtgaatgtgctaacatccagagtttaagaaaacagtttaggagagaaaggacaggctgacttatttcctaaatttctcataactcaactggtattagcttgttagtgcctgagcagatacttagaattgtaccccccacaaaccaggatcaccaatcctgtgtagacctccctctaaacaacacccccaacacacttaattcctgcagcttccatgacctcaaacagtctagagtgccacatctttcacccaaaccatagtgatttcctaacttatttctcatcaccactctccaatgcactgcccatatgactagtcaatgatctcaccacacacatcccatcagaaacccgtcctgccaaattgctgatttttctacttgatggataataaaaagtttatcactcatgatgaacccgtcatgatgtagactgtgaagtcccagcacacttcatcagtttcctttgattgctcatctttcttggaaaatacacgaccgtttctgccagggtgctctgatcatttctcccatatgcctggaatgctcacatgccatattaccagctctctgtcgggtctccacacatgaccggcatcttaaaactccataaatgctccaaaccttgcctcttgagaaaagtctcctgggtattctttctacataatcatcaacttctgattccccttttatttcctaaacctgtagcttagatgtgtgctttcatttattgtttacttttctatttagaggtcccgatctgtatagtcagggccgctccctgacatatggaagggcataaataatcacaaacacactgccctgatcttcacaccttaaggtatgtaaattaggaccagccaataataaagaccccctccatacatacttagtttcttgttaccattttgataatcttgtcaactgtcttgccaaagctcaagtggtacagagttagcaactggaagagaatatctttctgggtcatttctctaaacatttgaaccttaatgggaagggcaaatgaccagccagtgccatcacaactaccacacaatggcacagaactggaggggattttggcagcttggctgtggatggactggtaaagcagcctagcatggacgaagtcctcagctcagtctctaccagagaaactatggtggcacatacctgtaattccagtgaggtacaggcagaagggtcaggggtttaaggtcatccttggctgcctagtgagtttgaggccagactgggctacatgagatcctgtctcacaaaaaggtgggtgatgggaattccacttatgtatctcccttgatacttattttcaattgccacggaagccgtttcttctttcccaaacttctctctgctaatatcatacctaaatctgaatatgaacatacagtgcacttaaatacaaattttggaaagaatttttagcatggcaagagaaatctccactataataaatgactttgtaagaacaaacatccaaatcatttctctctaattacagacctcagctgggctgaatgcagactgattgccacaggctcgtgcaattagaggggtagctagcccttctcttggttcatcaaagactacctgcctccaagtaaaataaaccagtaaattaaatcagacaacattttaaacataactcatactaatgtctcaattgatttattgaattaaaatgtctaactgattaaaaatgaaattacggtataccacacttcatggagcttgggcgccagttttctggagacagatttttgttgtctaaaatcattttagtgctttaagctgtctttaaacctcttgcaagggctctgggctccatgttcagagtcttctggctagatctcaactcctcctcatcctctgctgtatatttcactgctcagtgctagatggtacaatcaagggagatgagactgcccaagaggaaacaaacacttcagtgcctagtaaagttcagggtgtaatgaatgaataacaaaaacataacacaacagagctatacagatgaaaattctagatgaatactgatttcaaatcacaataaagcagattgagcagtgaagttgctctggggtgggctacctgcttcttccaggatctaactcacagttcattagtcagggaccaagatggatatatgtgcttaatcatttgggcttttgtcccagctctacaaggtcttactaatgtggctgggtgacactaatgcaaaagttttcctatggtcttatatattataagcacactctctgagacattgggggcaggggcttggtagaatttgttaacataccctgcccttctaaatattacagtaacatggaattgaaaaaaaatactttccatgttttgtgatgttcagtgatgtcatgtctgaatcttttaaaggaaaatttcttattaataaatttaagtatagcaagtagatggaaaagaccacttttattgacttaacaaaaccagtgggttagtggtccatataaaagcaggattctatcatatcagacaacattcatatagaagtatacagtaacattttagacaaaagaacagacacattttaaccaaacaaaaaaggtaactgtgtcatagtaaccttgcatttataaactcttcttagaatgatgtcttcacttattaatatgttaaatcatcttattgaagattcaatgtggatacaatttatattcaatgatagaggaacagccaacaaacctctaaacatgtaggttctgatacacacacacacacacacacacacacacacacacacacacacacacacacaccatttcatcctaactacacattgatgctgcaatagaggtgcaatcacctccattttacaggtgagggaagcattgctcttgatggatgaatgactttctagacaatcccatagctaataactggcaggcaactaaaaccccatgcttttcaaaccacatctagaaagagggccgatctactcaacaagaatgaaggggaactcactatatcactaaacacatcaatgaagtctcacaaggtatccaaagccagaattgcagactcttcatagtctatcataaggtatcagttagaaataaaatggtgaggaacattcagacaggacttaaaatcttaaagaatcatttatttataagtaccaaatgagaagatgggaaatcttatccagtaataagagttcaatggtataatccaaaaaatttccttcttaaaggcagccccctaaaactcaggaagtaactgaaacctattaggctcaggatattagaggactcacaaggcaactcccaaaaatttaaaaagtagcagcacttgctggggacatatgactctccaatcagctgagcagtctgagttcagcaggaatcttcagggatgtcgcttttgtgactcattgcccatctaggatgggccttttgggaatacagctgtttttatgttagctatgttccagtaagcatcgcatcatactacaactaacaccacaactcaatggcttacttagctacacctgaatgaaaccatttctttggtcagtccttaatgcccttgctggggtaaagagacacttgtctgcatctccccgggaaaagcgacatagcacatgataaattactttggcaatttcatggacacaccttacaggtttgataaactgagacagtagttcactgtttccatttttttagaaactgtttatcccttattgccccccccccaaaaaatgctaagaagggaactgccaattatggcgagccctggttagaggattgggttgaagggcagttgagctatttgtgatggcccctggctggccatagtagtagagctaaagttggccagagttcatttggagtttactctggaattcttctatagggcactagagagtacttcctatgccagtgttgttatgaaaatgttagccatggctactcataaaggccacaggacatgagtctaccactaaagaaaaggcttggctggaaaatgaaatgaatccacagaagagagtgggagtagagtgtgatcagggaaaggggtggaaaggggaaagaggtgggaagtgagaacaagaagagaatgacaagaagtgggggaaggaggaagaaaaaaagaaaggcagagagaagacatttaaagggaaacaaaggggggaataaccttcaaaggaactgagtttgagtctcagcacccacagggcagctaaaaaaaaatctataagtatggttgtagagaatcctatcccctcttccagtttgtggtttctgtgggcaatgtggccacatgatccacagatactcaagcaaatacccattcacatgaaaaaaataattttttttgagagagagagagagagacagagagagagagagagagagagagggaaaaaagcagagaaagaggggtccagagatgcatgctcaacctgctgactaccagcagagttctgcatcttggcatttcataggcaagttcttcccccaccattctgtggccagagtatctaaacaagagctctcattttgttcaaggtatttggagaagggtctttatgacccataatgatcaactcaaaattacgcaggaagaacatgttcattgctctagagagctaggtttgtatttccatgtccatgtcattgaaagtgatgtaacaggtcaagtcagtaaatatatacagatgcaccaaagtggaaagactgtggctaagtcacaggtgagtgctctcccagaaatgtggacaatagccttcccatgtgaaataaacactacggtgcaagcaagagaatttatagtgtgaagtaaaacaccagaaataaagctgatattcgttgttttgaaattgttcattttcaaacctcatgcttttgttttacttatgaagtgcgcccaactttgagcaaagggacaacactgtgcaaacatgtctgatcaatggctccgctcttcaaagcagcctggtcatcatttgctgagaggcataacaggccagtccttcctgcctgccacatgtcctactttagacctttatcacaagcaaatgtagtaaaattacaaggggatggtaagaaggactcggacttaaccaattcatagtacagcagcaaatgaaatgcagtcatcatgtgtgtatccaaaggcccttagcatatttctaggatgtgacaagtctaggacatcagaacaaagactggatggtcaaaggagttaaaaagtgaagatgatctgtatcagactcaataactcaatgtggtaagacaggtagtgttaatgtcacctagagacagaacttgtcaggaatgttaagcagagactagaagtgattttaggttacagtgtgtctgagtccgtgagtctcaacattttccttcagacagcatcttcttaccagcatttttgtctggtgatgcaggaaatactgatgattgagtctaccttgcccctgtgatgtgcttatgtacatgtcaggaaagctattcttaaacttattcctgtcttgctgatgcccaaatcagaggtccctaatccaagagatgctaccaataactgttctatacaaaatgctatgttttctacttccaacaacagggtgagtgggtttcagatgcttttctaggtgaaaaaaaaagttaaatttagagatttaagaggagaagcattttaatgtgttagggttgagaaatatttcccctttatacccctttaaactgagcaagcattttggtgggtagagataaaaatatttaatatatgcatgaagggatatgtaaatgaatgtatggcagaacacagattagagtataactattttttgtgtctgttgtgtgtgtgtgttgtgtgtgtgtagatatgtgtgtatgggtacacatgcacctatgtgggggccagaggttgactttgggtgactctgacaattagttctccatcttatttttttagatagtctctcattgaacttggaacttcctgattagtctagatttgaggggccagtgagtcacaagagatgatgcatagcttcaattgtagaagtgaggccatgtctgcatcatatagactaacaacaaatgctagcaattaactgttcacgtaaggagacggggaagcctactcataaatgaaacctaggtgcacatcatggtgtatgtgcgagcagaccaacctgaagataatgagcagaaaatgacggaatatggcagagatgaaccatgtcccttgggatgtaagcactctaaagaactaaagcaaagccattgttagagagcaggggtgtgaggaagtgtgctaattggttctgggttaggatttgctttctgagtggattatgtttccctttcattttcccactagacccagctatttggcgaggctgccctgggagggctagctttcctcatgagttaatatttaatatgcctttgtggaatttcataatccctgagacattatttcacatactcaagagggaaaaatttctcttcattcttgaacagatttattttaggaaacatgttgtaattccacaagaatcttgaggggtcttttcaaaaagcatgatcatctatggtttggggagacatctggctagaattttgagatgaattgatgaaactgacaatataccatgaactgaacaaaagcaagcaaaaaaaaaaaaaaaaaaaactattccgctgacctttgcagcctttgctaacaatctgtagaggggagatttatccctatagggttattcagtctttcatatggtttttctttttgtgtttctttttccacaagaaaccttactttactagacaatggcactgcccctaccctcagccactctctgtcacatcacagcctagctcacactcctcttagtcaaactctaagttctgccaagtatcagcacctcttcaacttgctatcccagggtgagggccatcaaagttttcattcatgctataaaaattggcaacccccagtggagtcacacttaataaaataccagttttaaatgccattgtgaaaatgaaaatacctacctctcttgcagaatcagtttgttctcctttttccaagagtctttaaagtcagagctgaattcatgccagacactgaagaaaacatttggggacacctccttctctccaagttttggtttcatgaagtagtaggctgtggtctccaaaaagctgtcaaagcatacacacacatgaacataaaagttatgattactttccaatatgggatattccttctccatccaaatgctgatttcattcatgcacaattgttattaccagagagattctaactctccatgcaccaacagtaatttctattatgggctatttcaaatatgggctatttcaattatggtatatctgagtctttgggcaccaacattagttctatgttgtatcataagagttttagttgaagataagagtagtgaacaaaaattgtctgaatactaaaaactacaactgggcaaattccatttccagagagtcacatgacatatttcaaggaagaactgtggacaacatggagatgtatcaagaagtagtgaccctaaccttgcttagtaaactctaaacaaatatagcatttgcttttcactaacttaatatgtattctatgtccatataattccacatgtatataattcgcgttcttgtgttcatggatgaaggaggggctgtaggagacttaggagacacaaataaattctgctatctagacaacaaggtggcagctagcacacaatggacactgacagtggagagatcaggcctagttttctgttggtgtgactcagaaggcttattgtattgtggctacagaaaggctcaagtttcaaatgggtcattcaacaaagaacacacaactagtaaataataggtttaaaacttgacaaaaaaacctctccaagccatgaaaacagttccctaaacaggagcctggtcaacagtttattatgtcattaccactgaggagagttggacagcaggtcacagaatgtcatagagggtcagaggtgcaacacaaaaagtggtgtgcaaataaaccttatcttttttatcactttggccgatggccagcagtatttctgcttatagacatcaagcttgatttatgctgaattaaaaactcgtaaggcaacctgatttttccaaataactaaaaaatgtgaacaaataaatacgggaatgtatatatgcatatgcatgagtatgtatccaacttatcatgtagcagatgtaaaatttttgctataaaataatttggacatttaaaagatgaggccttttatagtgagtttgctcagaaggttgttcaatggtgactgaacagcaaacacaacagtaaaattcagaaccacagagtggtggtattgtagtcaacaaagcttacctgagcctagattattgttacttgaaaacttttcctagtacccagccattataacttgaaatggagtcagcattgccagttttggtagtctccccagagactgaccattgttgatttagcagttggtagctgagagattgggaatacagctcaggcagtaaaatgctccctgtgttagcctgaggacccagcatccatgtaaaaaagctgtagttgtggctcacacttgtaatgctagcaacaaggagatggagacaggagaatccctgaggctctcctgccatcaatcctccttgtttttatgagtcccagttgtgtaagagactgtgtctcaaaaaataggatagagagcgattgaagaaaatattccgcattgatctctgcatcctgcatgcatttatattcacagacacacaagaacacagacacacatagccccccagaagttggtggctgatgtctccataagaaaataactccatgatagagagaacctccctagcattctcaaagccctaggtttcatcaccagtaccactaacaacaaaacacaaacaaaaacaaacgaaagttcatatgtatatctgtgactttgggttaactaatgtggggtgaatctgttctgcctttaaatttacaacatgactgtccctgagcaacacaatgtttggcttctaggaagagaaggcaacactgttttgattttatgtgtgcctctggtagcctagtagggagatgacacagtgtatgtagtctgcaaatgctgtgaggggatgatgtgaagtgtatttcatcgtcagatgctccctgccacagtgatggcatgggaatgtggctatagaatgggctgcaactggcagagctgtggtaagtagatgtcagagagtagagagtataaatggtgtaaggcacatctagttcttctgaaatctaataaagtatatacagacatgcttgcagggagagctgctcacttgtcctttgttcctggagaatgtttgtgatatattaattgtgatatatttagcctatgcctcgaattatttgactgctcatttattcttttgttaccaaggagcccagtctgtgaagctataataactcatccacccactcagctatcttgcaatattttggaagttttatcataaaacaacatggtacaaaggtgaggccacatgatttagagtgagaagatgtggaaagatggattccagttctaactcgccacatgggaaaaccattaatgacattattcttaaccttttcatctacaagagagagatttttaacaattttgtcatgtcataagggaaaacgaatctccaacttgtctgttgaatattttcacacaaattaacattatatattatgcattagtattacatgttaatataaatatgtatagtttataaacattttctctacattaaaactaattctaatattaggatttattttatttaaaaattcttgtttgaatgtgtatatattggtatgttgtgttcacatgttcatgcatatatgttggtgtgagaggctatatttgcctgcaaaggttatgcccatagaggctataaccataggtgaagagtttgatgacttttagtgtcttatgctgtaactctacctttgtattctaagacagtctctcattgaactctactcaccatctagcaagccatggagatctgcctctcttcgtacccccaaaccctacccctctccaaaataccagacgggtgctaccgcatctcttttacatggacactggggggtctgaaatcctgatatattctgttattacatgtggaacataattgtttaatgacatttcataggttatcatttgtcactcctcagcatggaaataccaaataagtgtgcctatgaattgtaagtgtgaggatgtttgatttttaaaatgtttttttctaatttttgacctgaaagtaataaatgcaaaaaaacaaggtaaaaggtgccaaacaaagcattatgagacaaaagaaaatagtattgagttcattttgtgctggccatgtactgctgagtgtggggccttgcttaagtattctctgtatagctagtgagactccattggagaaaaccgatttttcgtttgcaagcatttgcagttggagacggattctgggttagggatggaggctcatgttcactccccctctcaatgccggatctcttcttgtcttggacccgtgtaggtcctgtgcatgctagctactgtggtatctcagagttcataagtgtgtcagttctgctgtgtgcggaaggcactattttcttggtgttcttcagcccctgtgacctttacagcctttctgcctccacttctgcattgttccccgagtcctgagaggagggacttgatgtagacctctcatttaggattgcgatttctaaaatctctcactctttgcacactgtccagttgtgagtctctgtattagttcccatctcctataaaagaacatttctatgatgctgattgaatgagaaactggtcatatttgtgattgttgtgagaaggcccaacccaatgtgggggggtgttatcctgggcttgtgtcctgagtgcaatgagaaagcaggctgagaaaccacgaggagcaagccagtaagcagcatccttccatggcctctgcatcagctcctgcctccaggttcctgccttgactacatttgatgatgaaagggtaagcaaaataaactctttcctccccaaattgattttggtcatggtgtttcatcacagcaacagtagccctaactgaaacatgtactaaaggattttaaagaatttcttaaaaaaaatggaattgttttcagcaaattactttttaacaaagaggtgaaatttttgtaaactcatattcaagatcattaccatgtttaaatacttctggcaaaaactgattcacagaggggtaaccaaacatttgataaagaaataaaaccagccgagcattggtggctcatgcctttaatcccagtacttgggaggcagaggcaggtgaatctctgtgagttcgaggacagcctggtctccagagtgagtgccaggataggtttcaaaagctgcacagagaaaccctgtctcgaaaagaagaagaagaagaagaagaagaagaagaagaagaagaagaagaagaagaagaagaagaagaagaagaagaagaaggaaagaaagaaaaagaaagaaagaaagaaagaaagaaaattaattttacatgaacactctcaaagggaaggtccaccacagagcacatttgtgaaatcagaatttctctggttttgatattaaaaaacaaagcagacatcataaataaagctatacttattgaatatagggaaatcatccttgataagacactacccaatatgatacagtaacttctaaatcagataacatatcatggccaattcagaaccgtagggtcctgataaacaaaatcactgacaaagacataagttgatgataacagtttaaatacaacttgttgtttttgaaagtgtaaaatgttatatgactttgaagtttgacagtttagaaagctaaacccatgttcttagatgacccccaaaatatatccctatgtatcatttccatgaagaatgaaaatgtgcacacagaaggaacattcacaataaccctaaacaaaaatggtaatgtccatcgacaggagaatggataaacaaacctatctatgggtatgatcaaatattgcttagtaatatgaaagccacgagtaatatgtacacttgaatgaatctcacaaacacatgcagaagaaactgaagcaagaacaatagacatcatattaatgttgaatatattaaaaatcaatctaaattggcagaaatgagaacattgatctcctccctcggtgcaatggaataaatagattgaggtcatagacctgttttgtggcaggacaaggcccagtgggagtggtgtgaaaggatctcactgtgtgtccaaggctaaccttgaatccaaagatcctctgcctccagtactgagattactgacattgtgtcaccatgcacaacacactgttgtaaaaacacattttggtaatcactcactgaagagaacatgtaagttgtattacatatgatatacaaattatgcttgatttaacaaagaaagtatgcaagcagaatgaaagaagaaaacgttgagctgggtgtgatgactcatgcttgtcatcccagcatctaggagagctgaagagagagtattgctgtgagtttcaggctagtctgagctatctagtgaattctggcccagtccgtgttaaaaagtgagatcttgtctcaaaaacaaatgctgaaaaggtacatttttctattttaaaaatggagaatagaaataaaatttatatacatacaaatagtcttttagtctgcagtaggttcttcatggtggtcagataattatggagataatagggaagacttaaggctaaaaaagaaaagaaactagtggaatggaagaacaagaccatggaagaaaggaaggaagactgagacttattcctgagctaatctattaaaagcagcaagaaacctggaagaaaaccatgggtacagaccaataagaacctgccagggacatacgcccaagaaacaaatgaaaacactttcctcagacatgctgaagcatgtttctaaaacaacagagtcataaaaatgaaatgcaaaacaggaaagactcagtgaagaggcagtaatagaagttagcaaagaacatgaaatcaaaactgaccacttaacacacaaagagtaggcaagaaggaacacaatggttcataaacatggcatgacatgccgatattaacaggaaaagaaatacaaagaatattttaaaaaatcagagaaatgaaggaaaaatgagaaaaagttacaagtagtgaagacaaaaaaagtccttgcatgtgaacaataaataaccctcaagtcttaaatattgatcccataacaagcagagagcagaataatggtcaccagaaagcagagagggagaaacacagaggggaagaaggtttatcagtgaggactaagttaaagttagatatgagagataagttcctgtgtgctaaatgtactttaaggtgactatagtgaatctgtatgttttaaaacagctaaacaacaggaatctgtacattcttatcacaaagagtaagtgtcagaggagacatatatgccaatcattttcaaatctaatcattatgcaatgtctataaatagataagcatatggttgtacctgatcaacctgaagttatgcgtcaatcaaaacaaaatttaaacaggagaaagcttgcaaagtaatgaagaggatgagtattaaaactaagacccaagggatcagcaaggggctcagtgtgtagaagaacttgaccacacaaacctgatggcctgagttcaatacttcgaacccatgtaaaggtagaaggaaagagcctactctatgaggttatcacccatctcattgtctttccctctccctctctctccccatcacacacatgtaacaaatacacataaaaacatgactcaaaactcattgagatgagaagagcatgttcaatgaaacacatatttaaggcaccaaacacaaagtatgaggcaaacatttaatatccacccaactatagagagcacgggaaacattacttcatgatcaattgctgagaaacctgcaggaagtggaatccacaccaacaaaatggcagacaagatactaccttttggcaagacaggtaagaactgtgacttggattgcaagtcctgatagagggcacccatgtacattgattccaggttgtttgcataatagtgtagtcacaatggaaattcattgtgaaatcagtaggagagattagatgattttcacaaatcattgaaaaattcggagctgggactgtttggaggaatggtttagttgagttctaagggaaatataaaagatgctctggggtcctttatcacaaaacagccaaggaagctctgctaggcaagcttactttgtcttttggggtgacctcctttgctgttttctatgatgaggcaatccagtgacatcgtgcacaggagtaaaaatattacttacaaagacatggccagtaccaaccatgttcccatatgtgagctcatcagagacccatcctcttgttttagatattggtgaactaataaatcttatctttctttttttcttttaaatttagaaacaatcatatcacatatcagcccctgttccctctcccttccatcctcccagtccccctaacaaccaccccacccacccccacccgcaccccaatgacagtgatgccttccatggggggtcatcaaagtctgtcacagcatttgggggagggcttaggcccttctccaagtatctgggctaaaatagtatccctccatggactcctgaagtccatttgtgcattaaggataaatatgtttccactgttagaggtcccatagactacccaggcctcctaactggcaccctcattcagagggtttggttcagcccaatgtctccagctttatgactgggatccatgtgttctcactaggtcaggtcagctggttctgtaggtttctccagcatggtcttgactcctttgctcatccctcttccctctctacaactggattccaggagtatggctcagtgcttagctatgggtgcctgcttctgcttccatcggctactggatgaaggctttaggatggcaattaaggtagtcatcaatctcatcataggggaagggcatcaaagttggcctctccacttctgcctagatacttagttggggtcatctttatggatctctgaacatttccctattgccagatttctctttaaacctatactagctccctctattaaggcatctcttttcttgctctcttctatttctcccctgccttagttttcctgatggctcttctctcctcccccctcctctactccccttctctttttcctactccccccatgctcccaatttgctcaggagatcttgtccctttccccttctttggggaccatgtatttttctcttagggtcctccttctttcctagtttctctgctggtgtggattgtaagctggtagcactttgctctatgtcgaatatccatatatgagtgagtatgtaccatgcttgtctttctgtgactgggttacctcactcggggttgtttcttccatttgcctgtgaatttcaagatttcatttttttttcattgagaaatactccatattgtgtaaatgtaccacatcttctttatccactcttcagttgaggggcacctaggttgcttccaggttctggctattacaaataatgctgctatgaacatagttgagcagatgtccttgttttatgaatgtgcatcctttgagtatatgcccaagagtagaattgctggatcatcaggtagactggttcccattttccggagaaactgccacactggtttccaaagtggccgcgcaagtttgcactcccaccagcaatggaggagtgttctcctttctccacatcctctccagcaaagactgtcattggtatttttgattttagccattctgataggagtaagatggtatctcagagttgttttgatttgcatttccctgatggctaaggatgttgaacagtttcttaagtgtctttcagccattttagattcctctactgagaattctctatttagttctgaaccccactttttaattgcattgtttggtgttttggtgactagcttcttgagttctttgtatattttggaaatcagccctctgtcagatatgggattggtgaatatcttttcccattctgtgggctgccattttgtcttgttgactgtgtcctttgccttacagaagcttctcaatttcaggaggtcccatttattaactgtcgatctcagtgtctgtgctagtggagttatgttcatgaagtgatctgtaaatcttgtctttcttgatgaaccatattcactgagaaacactatgtccaagaaaagtaaggtttgttttattttattttatttttaaagaaaatgagtttcacttaatgacttgggggggggggacccaaagtcctgtattttatatactgtaaagaattaacacatctgaaaactgattttcaaacactagaagtgtcacaaaaacaaactgcatgcttcttccttgaagtcaccacaccatgctcaagcacttagaataatctgtcactccatagagaatgcaggacaaagtaaactacattattgatatagaataagggaaactgacacaagcagaaactgcagaataaatgagctacttacttcaacatctaagttccaaagagaaagtctaggaaatttattttagggactttgaggtatcacaattaatctttgtgatgaaatactacagcaacttgatatcaaaatataagatgtgatgttacaatagaacattatattggcatagtggtacactgtgatatgtcttcacaatggagaattttgatggcataataggaccaaagtcacaatgattctcaattcaaagtcaagatgcagcactgtgatggaaaattggaatattgtgattaaacaatataacattttgatatcacaggggagcatttgagttcatcatggttattgtcatagcaggatgtatcattatgatatcagaatatagcacttggatggcacaattcacattgtggcggtacacatgaattattaaatttcacatttatgatgtgccaaggaacattttgatgtcataatgatacattatgatgtcacgattggccactgtcatgtcactggggattaatatgatatcatattgagtcacttatactatcaagatgctataatagaatactgtgatgccacaaagggacattgtggagttataattgattactgtaatgttacaatgggacattatgattacaaagtggtacattgtgatgacacagaggggtactgtaatgttataacatgacactgtgatgtcatcatggagaattggagtgtcagaatggagtactatactagcacagtatcactgtgacatcacactgcaggatttgagggcaccagggagtatagtgatgacacaatgcatgactacatagcattcatttataacaactcacctctgcgaagccacaagtttacacacacacacacacacacacacacacacacacacacacacacacactcattaaaatgcatcaatgaagttacactgttaggtgactttctttaaaattaaagggtggggatgagtgagtgggtcaggatatagtacagtatagccaaagtgactatggatctatgatagttgttcaagttaactggaggtatgtagaagatgcttacattgctatatttacctttgcatatatctttacctttctataataaagaaatatttttttaattcacaacttcacatatagacacaaatcacagaaagataataactattaagtatgttttaaatggtaggagatcttctttttatttaaaaaatgaaattttaggtccttatgcaggtatatattgtgtggtgaacataatatctcttgtaggcaagcatctctgagaagcctttacccatattcttggttgtgcactctttcccctaagtgccactttttctaataacccatggatttaaatgcatattaatgcctcttaagaaactccaattgtgcttcaaaaaggatacagtccttaatatgttcaagatatttaaaatgtatctggtggcaattgaactttaaacacctaatggactcagcaacaagtttttctggttctgatctttttgaagacagtatactcaaccgttgctttgatctcatagcttgttatagtataagttgtttatatgatcttaggttaatctggggaagtttcatgtgtctggaaatacatctattatttaggtctcaacatattggaatatatgttttaaaagcatttcctggtgatcctttgaatttattagtatctgttcagtgtcttccttttcacatctaatcttattaatttggatttttctctccagctctggtttttcttggataaggatttgtcaatcttgtctttttgaagggtcaatacttcattttgtggaaccttggcattgctttcttcaatcaccattttattaattaattgccttggcctttatgaattctttctgcctgtaactctttgggattttgtttctagggtgtattattgggttgtttatgatttcttagattaatatgaaattctgttacacaggcacttatagctcacatgttcccccatagagttgcctttgctgtaccccagaggttgtggtttttttctttctttattttttttgtttgtttttgtttttcgagacaggttttctctgtgtagctttggagcctatcctggcactcactctggagaccaggctgatcttgaactcacagagatccgcttacctctacctcctgagtgctggaattaaaggcgtgtgccaccaacgcccagctgaggttgtgctttcatttcttcatttgattctcatagtctttacatttcctccctgatttcttcgatggctcattcatcacttaacaatgtgctgcttatattaacataaacagcatgatgttgacacaagatacatgcagaccaatgggatagaaaagtggactcagaagcgaactcacatagctataatcatctaattattgagaaaatgtgaaaaccatacactggcaatgagactgtctcttcagcatcatgctggggaaactggatattcacatgaaaaagaatgaaactagatgcatatctgtcactcttgataaacatcaatttaaaaaagtctttatgtaagatctgaaactatttgaggaatatataaggaaaacacttcaagatataggcatagttcacaggacatgaagaaatgaagttgataatgaccagacagccttatccccgctggtcagctttattagtactggaaggtgctgtaaaagagtagcagcctggacttatctgattgtgtttaacacaccttccacaggaggagtataaaagtctggtcaggaactgttattggtagctgaaagtctattatcactttgctaaagagacatagtatcaactaccctcaaaattctacctctatagccattgactattatagctgtcagacctcattggagaaatgtttttgtgtagtgggcagtagtaaatgcaaaagaactggagtgtctgtggagttctcagccacaaatgggacatctatatcataaaccctttccatagttttcagaaacattctgggaagaggcattagaaagattataagagccagagaccacggaggacaggagtgaggcagtgtctctcgacatgacaggattgatgtaccagtgaactcacagcagctttcttgccagcacaagattaagccagtcaacattccagcttggagaggaaagaggctcttgaggctggatccctagctgaggagtgactggctactgatgacttccatttgtgtccttttcctttaagggtgtggctccttgtagttaattaatgtttatgtagaatatataaagactttcaaatattaaaagccagaaaatccaatcatctattcaataagcaagcaaatgcaaaagatgaagtaggcatggcaaattgatacattaaaaaaaaaaaaagttcacaggatgatgtggtagactttggggagccccttttgaggcgcctggggagtggaggggggatggctaggggcaggtgagatgttgggggggaggggagggagagggagaggaagagggagaggggattgacatgtgaagcaagcttgttcctaatttgaacaaataaaatttaaaaaaaagttcaacatctttaaccatccagagaatggagactaaaactacattgatattccatctcatctcaatcaaaatggttactactaacacaaagaaacacacaaaacaaaaccaagaaaggttggcaagggagctgggtgtgaggactggcatgcattgctggtgggaacgtatgctaatgaggtcactatggaaagtaacaagaaagttcctctaaaaactaaacacaaaacttccatatgacccatctatgccatgcctaggaacattcccccaaatataagttagcatattacagagataaccgttaattcaaaatatctaagatatggaatcagtttacctatccatcaagagatgaataaagaaaatgtgatacatacacccagagtggagttttattcttatataaagaactgaattattatcttttgcaagaaaattgatcaaactgaagattatcatattaggtgaaatatctagaatcagaaatgcttcatcagaaagacttatattattctttctcccatagttagaacacacacacacacacacacacacacacacacacacacacacacacacaaaatcaaagggactttttggaagagggggagaattccttgggggtaggaaggaggaacagagaggacagtggacagtaaatctaatgcatatgatatacctgacaaaaatttcattgaaaccctttcattgtatacattgatatgttacaattgaaaagttttaaatgtatttgaatatgagctatatgctccaaagatagttaaaaaaaaaacagctttggcttctttacttgaaaggctctcacatcacaaattaagaactatcttacagtcttctcatgtgtattctctcctgggaactatacaaatgcagaatacctcaaaactttgtttttattacaacccagaggtgctaataattactctaaaatagtattttctaccacacttatgatctctatggagaacaatgttctctgcaaatgaaacactatcaatattatattgtcagttatgactatcatatatttatttcccatctatgaccgtgattccctcccaggagagttctagatataaaaccttgaatggaaccctggcagttttggtagtctctagtctgtcacagtcctcagaggggacaccactgcttttatttagctcaggttagtagtgcaagtcataactgtaccccaggttttctgcatggcaggacaaagattaagaaaaagatctctagtattccaagacttttttgagaaacacttccactcagttggcagggcacggttttgtttgcctagacctggacaactctctctctagctgctccactgtagaatgaacaaattcctcaaggaggggaaagcactgtttgaccattcacagaatatgataagtagctcttcactagtctaaaacaacaaaggatggaacttttggtggtgttcatacaatgaatctgatacagaataaaaagtgccctgaaacaattgacagtcattgacctaaaactggccttataatcatgaggtggtttggctttgctagctgatatcagagaaccatcctgctctagttggaataacatctgatctccttacctgctggtcccttgtgcccagccacctagcctcacattctaatggcactatcactgttgttttgtatttctttgggagatgtccaccagattgtctccttcacatttcagatctttgtttagggattacctagcagtgagatcctcatgagaagtcaaagggtaaccctgcactcctctaaaatagtcctggcacaggttctttccacagcactcaactggcatgaacacaatagggacacctagagaatgcctggtaaacagggattaattgattcagtaatcatttaaacaatcactgtctgctgaacaaatgacatacatgtttgtgggagaaaaattctgattttgcaagaattttgtagtggaagaaatctgtgaggtgctgtcttttatttccaatggttaaaaccatggtctatggatttgaatgactgattttgttggtctagaaaggtccttcactcaagctttgccacctcatgtatagaaagaacgtgattctcttttatactaattcataccctgtgaggatcatgtgagttcaaatgtatgatgggcttcatagtgtttctacatgcatgataacttctgccaaggctttcttgatttttaaagacaggctgcacttgaagtcacagagacccagctgcctctgtctcctcagtgatggtattaaagacatgcaacaccacaactcagcctgagaagactcttctaccttcttggtgtgttcggagggtgataagggtttgatctgtctttcacattgggaagtttaggagaaggaatcttttcctttattatacattccataattatgaagccacacatgtcatgtgcatacattaaaaatgacatcaactaggggatggctctctagtgccagagttggaagacaactcttactcagctatgcagttcattccacttggtccaggagaaactttgtaacctgccaagaaaattcctcactttgtttatgtaaaaaaatcttataaaagatgatatagatagatagatagatagatagatagatagatagatagatagagtttggtttttcgagacagggtttctctatgtagctttggagcctatcctggcacttgctctggagaccaggcaggccttgaactcacagagatccgcctgcctctgccttctgagtgctgggattaaaggcgtgagccaccaatgcccggcaagagccttgattctatttcatgagttgattgcatatttcttggtgctataggtcttattcacacacatacatatgaggaggaggctaactggcatcacagccaacagctgagcaatgaagactaccgaaagatgcacatttgtttaattcaaccccaccttcatcacaacatgaagaaagttgaaggtaacagtaaaattaacatctcaattcagatatgaattcctcatgtcctcttgggtctccaagcattccacaggcaggaacaggccatttattcatttcctctgcttttaaagtcaatgtcaacaagacttgagaccaaagtcctccgtccctgacccgaataccaatgaagcatttcaggatattttggggctgttctgtttgtactgggggtgtaatgatgtgtatagtgctcatgtttctcatgctcacatcagccttgtaatgagtcagcaactgtgtcgtggttgagacacagcagacccaggggtcagtcttctattttggtgcttttgtggcctttccttttacttttctctcttactatcactctccttttggagaagaccaaaaaggtcagattctataaacagtttgtaaccataatgggaattgcttgtacaattcaattcagtccatcccggcacaaccaagaactcaaggcatctaggtattaaccaaggaatgcattgtttaaaggactgcctaagatcagctgcataaatcttccattgctgaactcttttttttccttattgtgtaatgttggattttgtaatattattttcagaataaactaaaatctcaagaggaaggtctattttcagttaaaaccttccacaatcagtttcaatgtctggaaccctaaaggtaccaactccatctctacctctcccctcagcccccataagaagttacatgaagtgttatatttcattacttcaaagaggaaaacaaaatttactttcattactaaaggactctgagggatggtccatgtcttctatgccaactatttggcctcaggcaatggaaaattagaggaattcacaatgataagagaataaactggtatttctttttctcttaaaatgaaagaatgtagtatttacacctccagggtcattgtgatcgcaaaacagcaaacttctcttagaaaaaaaaatgggttccacagaggaagaagaatcagctcatacaaaagggtggagagaaaactctcaatgagttttcccataccaattgtcccaggctgacaattaaggtagctctgtactgacgctctggtcctaagaacagacaccagaacaagatgatatctgtggctggcagtgccagggtaacttgtgttacctgcttcttacatattctcacagatggagatctttctagattgaccttctgtctttgtgtgttctgaattttaagagtagaaaaatggaaaccgctcccaaagatctcattttattaatacatgactttcatcactctgatttttctaactctccttattgtaccttcagcactgaaggggtcactgacatcaagtctcaatccaaaccaaattcttatgctctgcagcttttacttgagtcactgcttctccaagggtggcacccacccattgtctcctgttgccagtctaacacctgttttctagattgctttcttgctcttatgttaaacataaagatttcccaaattgaaacagatttctcccaaacacatgagccctctggacaacacacaatttagggatgtgatttcttgctgttaggtactcaagttttaatctggcttcacagactcccttccattctattctctttcagaggtatccagtgacattctgtgtcttccccagctttcacttcacattctcacctcacatcttgaagttttagaaccatcactgttgactcttgaacttgaaaataaattatcattagctcagtttctctctctctctctctctctctctctctctctctctctctctctctcctctctctctctgtctcatttttttgagacagggtttctctgtattgttttggagcctgtcctggaactcgttctgtagaccaagctggattggaactcactacctgcctctgcctccggggtgctgggattaagggcatgtgcggccaacgccaggccagtttatctcctttatcctttaagactgaacctacacaaatagatacattatttcatgcccccagttactgagagctctgggttaaccatttcatgtgtcactctcaatcacttttgggctaacagaaaatctatgaagtcagtaaagatggatcttacaaaatcttcaccctaatatttgcatctcacccaactattatatttgtcaaaaagaaacttcaggaagaacttccaacttgtgactcaagtttgagtgactcaagtgatgatcatagagaattggtaagggtgctaagcctctctggcactggagggccatcgcctaataggctgacatatctacataaaatctaagatgatttatataaacatcatgtgccatcccatagttgtgaggagacatggaaaaaggggaaggaaatgaaacaaaatatattctctaaccataatagaatcattagggggcagccaagagctgctcaggccctacatacagcatgaggtagtctgatggtagacaccactatgatgaacaaatatgtgatagagagatggaaaggtaagtgtgtggtggagagatggaagagaaagagaagtggagtggttcatgtcttgtacagagaatggaactggagatgtgcctgagatgggggacgggcactgccaccggtagccatgatggtacctaggcctgggctgctgccatggctgtctgggtctgtggccctactgcagcccgagtctctgtgttgatgtgtctgtggcccatgttgctaatacggccattgggatatccatgtctggattgctgcctgaggacaagttgatatttcgtgttggtggtagtggtgctgccaccaggcaagggggaggggaggcctgggtgatttcctggataaccaactcagctacctcccaggcccagatccaaggctttaagttggcccaccctaccatctaacccatctatgactgtctgaagcatgtgaaaagactggtcctgcagaaccataactgagggaccttcatgactcagggaaacagtaggatgtcctagaggagttttggtgagggttcagattgatgttggaacagaagccagaggccttgaaacaggccaatgactcattgaagtaaacatttgcaataaagctgtttgggtgaaagggtagactgtgtgacacattgcagctcccaaggtcactactatgaatggatatataatggagagcaggaaagacagagaagcagagtgatacaagtacaggagaacttttgtttgttttttcttattttccctttttcaaaactctaatttgggggggggggcgtgttacaagagtgtagggcagatattgaaggaccagaaaatgagtgggattggggcttatgatgtgacattgcaaaagaaccaataaaacaaattatgtttaaaaatcattttaaaattcaatacaataaagacaatagaagggcaactgaaataatttctaaacaatgcacaggtgaagcagactgtctcaatggatattaggggagattctgcccctcaatacaacaatttaagcaatatgtattggataaacttgagtaaaacttcaaagcattaaatatttatgttagaaaagaaaagatccctaaaataaaaaacattctatcttagaaaatattttctagaataaaaggtataattcaagcctaaaacttgcagaagaaataataattatcttattttattatttatcattaaagaataaacaaataaaattaaaaatggtaacattactttacaaaatagaattataaagccagctcttcaaaaggataaattaaacttgtaaacttcttagcagaaaagatgccaaatgctcacacagaaacatgtaagaatgggctttcacagacacctaatagcgcaatctcatgacccatgctttgtatacacatttgacaactcagaagaaactgaccaatttgctagaagacatggttacaaaatctctcataaggaccctgactgaagctatcacaatctactaatgaaattaagtcaacaaagtcaacagttaatgatgctccaaaacaaaaaacagaaggcctaggtggtttcacttgtcaattctactaacactttaaagaaatgacttctactaagtacaaaggtttccagaaaatggaaaagaaacagttcctaactttttctacatagacagttttacccaaatgcccatgggggtaaggaaaactatgggccaatatttttcttagaaatacatgaaaacttccacaaaatattagcaaatggaatccattgtaaacaaacaatatgattactaaaatgtattccaattatataggatggagccaacatttaaatcaaatgtaatatatatttaaatatatactatgtatcttatgcatgtaaaatttacaataaaacaaaaatgtgaaatactaggacataaaccttacaaacatatataagatctgtagggttcaaaaccctgagtactgtcacagtcatagttactgcctggttcaacaaaaaccaatcatatttttgacaagctctgtgacaaacaaacatattctaaagtttatatggaaaagcaaatgttttaataatcagcaccttactgaagagcagtgatgctagacaacaggtagtgtctggctgccagacactaaagacctacaacgagtaatacagtacgggcaaagaatagacacagagcaatgagacagaactgactgtaaggatgtagacaaaaccacctgatttgtgaaaaagcaattaagtcaagtccatggaaaaagtgaagtcttccaatacctgatgatgggacgcctggatatgtatattaaaagaaattaaaagaaaccaaacaaacaccaggcttccattatccaataaaaaggtcaacttgtcaataaattgtgtaatggtaaagaaacaaaaacttgaaagtgctctgttatttgggaaaagacacaaagataataataataaaaatgaatgtcattaaagatggattttataagtataagaaataaaagacagcatttccacagtacccatgagtatacatgattcacaacttcacagttcccaccttgcagcttaagctcacaggcttcagactctgtgccccgaaacccatcacttcccagggttagggagtgaacacaggagggacacaaatgcacctgtcattccagaagacatcaagtcttccctaaggtggctggtttaaggacttttcattactgttgacaaaaaagtattgtaactcccttctcttccccttcctttccattcccttacctccctactccttccctttcccttcccttcattctctagagctcagaccaggtctacattcctctagcttacttcctgttttgcatagtggatcaataattttgacactggcttcttggaaaacccacactaagcagtaaatccacaggtaacttgaaggagcagccagaaaagtaggatcctgaatagttcattcattagtcatctgtccgtggacagtatgagtgtcactgatatacagtggctacataattgctagttatcagcagggctaacctaagaaaacatcctgatttgggaatgtccttgcagactactgaaaatatgattgaacaaagccatatagaaagtggagttggctcattactgctaggttgcacagatgccatagagggggatactgagatgctcaggacattaagaagtaggtcaaggctacttagaaagaaactatcatcttccccattgataaggcagaaatgctgagtaatagagacattctccaacaattagtattacacagtgccagggatgtttaaatgttcaaattaggtctgctaaagttagagatatgtctgaaaattctaggatccccaaatagagggtagaaatagctacatagtagcttgtacagatgctttggagtttagagacggctttcactgttctccaagaagagctagtgcatcccctgtgccagaaaacacagaagatatagtagacacccctcccccagacattgtcctagctttctgctcagctgtcaataaaataattaaagtgatatttaagcaagagccaagtagaaaagctctaggttttacaaggaaaggaagagattttatggctctttcattacaggcctagaataagtgatggctaatgcagagagtagcatatgaaagaggggcataaaggaaatgttctagaatcaggcaggctcatgaaggttatgtgagcccagaaagctgacaaaggacttttctccaagggatctcagaggttctaacatttagtaaagccaccgagacagcagagatcagaggcatctgtacagctgagcagaacagctggactcttctctgtaggccagaagtgtgggtgagaactgggctcagtgaaagccactgagacataggactttaaaagaataggagccaagaggtgatgcttaatgacgagagccaggaaccgggaaccatgattaccataatccctgagaaagccaggggaccttggagatggttaatagagcatgacatcctcaagggcaaacaaacgtattgctcaatggttgcaacttaggaaaaaagcaagaacagagggtcaggaggcaaggaagggtgattctgctagaaaatccatgattcataaatcggttctcagaactatgctaattttgggtccagaatccactgaccacaatgactgagtccctgtgaggaaaggcatgaaacacagcaggaagaatcaaatgtaatggatctgaggagatgtttcagtaggtaaaatacttcctgcacaagcgtgaggacctaagttcaatcctcagcacccatgcaaaagccaggcactgtggcctgtctcagctctggtataattcagccaggattcccgcactcatgtgccagttggtctagccaaagtgacaagtttcaggttcagcacagttctttttacagaaaataaggcaaaaagtgattggaaaaagcagctgaagttgacctctgctctggcttacacacaatctctctgtctctctgtctctctctctttcttatatacacacacacacacacacacacacacacacacacacacacacacaatttcacacacacatacactgccccccctcaccacataaacacacacaattttaaaagaacacactataattattctagttttcctccaaaggcggtcttcttcagcaactactctcccgaacattggacaacaggaaatactcagacatactgaggatcctggaacagaggggctcagtggatgagggtacttggagacacaaagcttcatcctgacagcttcatgcttatggagatgtacaggctcaggtgctgacaggatcctgacatgtgcgtgcaggcagtaggaacagttttcatagggacagggacaagctgaccagagttgtcagtgttgtgacaaacactgtccttaaagagctgatatatactttcagtggcaccagacaaagtaaaaatctagtcaagtgcctgaaatgacacagcactgaaaacaaatattaatttaagatatcggaataaatttaaatttcggtatataaaattaaaaaaaaacccactggaaaactaaacagagaaaaaatgtcttgacttttaggagacagtgacatgtttatcttgctacccttctggtgtttttatgctcttttatctgtctggcaggacacaaagacagaataaatcatgaagatagaaaaatttaaacaagtttatcaagacactcaaaaatagtcaagctgggtgctgtggcatgtgcctgtaattccaggctgttgcaggaggatcatcaaaagtttattgccagcctaagctgatagtgagactgcggttcaaaaacaggggacaaaaaactgcagtcaaactgatataactgacatacatacagtaacaattcttaaactacacagaaatatgcctttcaatggtcttctttgtttagttttcattcacttagtaatgaaatagagcacttttgaacatctttgtatttggaaatttcaaaacacatgtctacagaaatcctgtatagctcagtgtggaggtatgcactgtaatgccagcacttgggagagaagaaggcaggaggatggcagattgaagtcagtcagcctctgtggcacagtgagttgcagactagcctaggctacaggtgtctgtttcaaaatcaaacccagatgacaacaacaaaacaaaacaaaaaacagaatttgtcaaattcctaatagattatgatgaagaacaactaaacagaggttgctagcaaaaacataaataaatctggaagaaaggtttaaaacaacagtaaaaagagaaattcatttagcatcattagtagttgaataaaacttttagattattattgattttatgtttaagatgattataaaaaccatatccttacacttacagtgtctagaaggagaaagaaaaacaatataaccattttctgtgttaggaaacctccaaactaaggataaaactatcatttgacaaattaacatttgtaaagaatccacgcaacaaaaaattgagaaaaaaatagttttctatcaagtgagaaacaagaaaacataattataaaaaaggaaacacttgagcacatactaacttgttagaaagaaataaaatctaccaactatccaataagtataaaggaaataatgatacattagggaagatctatcacagtagatattaaaattaaaaactgagataaatgattttacaaaaagcagagtaaaaccaaaatacccaacaagaacaaaaataaatatgtggaaaaacatgtagtaggggaaaatattaatgtcaatgaaaaggcatattttagttttttaaagagtcctaaatccaaacaataaaaaagagatagtcggggcacactgagatggtttaggagataaagtgattacaacaaaagcttcatgaactgagtttaatccctggatgttatgacagaaggagaactgattccacaaagctgacctttgacctctgcaggtgcaccctggcatttgtgtgccccatcatacacactaataataaaaagataataataataataataataataataataataataataattttaaaggagttctgaagttgagcttaaaatgtttacagaattaaaggagaaaaatggaaaattctataattaatcttaggatttaaaatcttctacaaaccagcaatgacaatttgaagcttgagattttacatttattatctgatttgactgaagtccaagtccataagatgaaacccagacccaacactgcttgggtgatggagaactagaaactagggtaaaacaaagcactactgttagaacaaaacacagtaatagactcctaatgacattctcctatactcatagatcagtgccttgcttgaccatcatcagaaaaacttccttctgcagaagatgggaacaaatacagagacccacagccagacaatatgcagagagtgagacaccttggaacactcagccctaaatgagctgtttctattaaatctttccccctcatgtctcaggactgagggaaccccatggggaagcatgtaagagctacagtgtatggtggacagaaagaaaaccaggccctctgaatcaacatgagcaaagctcatatgaactcacacagatggaagcagcaagccatgggcctgcaagggtctgcaccagatcctgtgtgtatatattatagcttccagtttagtgtattttatgggagtcctgagtgtgcaaaagtgggactctgaatcttgtgccttctcatgggctcttttccttctgtttgttagattttacttttaaagtatgtcatctttcactaatgtaacatgttatggagatttaaaaactgacattgtttcctgtatgagtaagaaagatagtttaaggtgaagaatctttacaaaggaagtcccctccactcatcccaaacacacacatatatcataacccaggattgcaagggttcgtgtagaaataaatgagaaaacaagctctgcctgaaagggaaagtaaggaaatttacttatctcagttttggccctgagtacacagacgaaaacttaagaaattcccttagatctgactcataaaccagacagaaaaatcctgcagggtttccatctgaacttaattaccagatttcattaaaaacaaaaacaaaaaaacaaaaacaaaacgaaagcaaaacaaaacaaaaaacagatcccagccttgtaagtaaaacataacaacaaaacaaaacaaacactagccccacacacagcccatgaaaacaaaatcagagggtttaagtttaactggatgcagtgctttcccttgaatggtaaaaaaaaaaaaatgcaaatactctctggaggaagctaattttaactcatgcactaattaacgcttagatacattccgttataaaacatgtttcattttcacacatgtcaagtgtaacaaaatgtgtaattcagaattgaaaaatcatagatttatatgcacagcaaattgtttcttctcaacaaaatatgagctatatatatcattagactgcatgctagatgataaaggaagtcacaatggctcttaggaagttggattcatacagactaggatatttgcttgcaaagcaagtaactgcaaatggacatatcagattgcaaacaaaaccaagaaaatatacacacatgaaacaatcaccataaatatacacacaaataacatctgcttaaagaattaataacaaataagttaaaactgaccaatgagaaaatatactttacatttttaaaacttgtgggatacaatttaaaaactttgtgagttgcaaaaaattacattttttttccccatgggaaagacgtggacaatgtcttaccccttcacaaaaggtcctaatgacaagctaaagttcagttctaatgaggagtctcactcggggaaatcaaagtaattattgggcttattatagaacacagtagaggggctacaggaaggattgatcgtgagtaaccctaccgtagctgcaccatggctgcatagagatatacctctcacctcacactacctacatattctcacctctccccgagaccctgaggacataggcaattagaaaaaaaatgcaaagaaatggatggctgagagtcctaatggctgatcctcaggtaatggttcaatgaccttcccacccagaagaaaatgtcagccgtttacagagtcagccataatgcacacccacaaaaaagcacagctgatctcatgaaaatgtcaggtgtttgacatcggatgaatgtgctgtgttacaacactgtacgtgtacgaatgtgggtacatgtacacaaggccgagtatggagatgccagagaataactatttggagttgacactctcctatcaccagtcccagagatcggactcaggttgtcaagttcggtagcaggtgtcttaactttctgagaaagctcgttagtccaagaaaggagaacttaaaagcaacataatagctgtaaaaattattaacaaaagttaaaagtaaactttttttttaatccatatggtaaaaatcacaaaataccaggacaggtcatagaaacaaaatactacagtgtagaaatatgtgaattgggaagcaaataaaccaatttagttattaaaaaaaatagggagatggcccatgacccaaaacatctgcttctttgaaacaatcaataaagtagacaaatatgctgagcaaatggccatgacatcagagtagacacagacatgtgttaatatcaaagggaaggtgaagaaggatagctttaaagggtgcaggagaatgtgttagacaagaggctgttttcagttccttgctccttaaatgcctactgtatggtgtaattattagaaacacagtagaaaaaaaacatagtagtggctataaagttaaaaccaggaggctcagagacccaggggaggtaacatatcagtgatagttataatggtcaacttgtcacatctacagccacctggggaaggcagtgtctaggagggattgtctagatcaggttggcatatgggcctatctgtggaagattctctttaatatttaattaaagtgggacaacgtccacggagagtcatactattccctaggcaggggaccctgagatgtatgagagtggaaaaggtagctgggcatgaccatgaatgtgggcattaattcactgctctctgatcttgctatagaggcaacatggcccctctttcagggtcctgtcactgttactgtttccaagatggactataaaatagaattgcatactacaatgacccagtctcttccctaaggtatttttaatcttaacaggaattgaaactaagacaggaagggtatccaagctaaaaggcgcaaaggagaaggcagatggatgtgcaatgggccataggacagcaggcctttcctctagtggatttaatgtttggggctgagaggaaaacaaggtctgaaggtgagggagaagagaggttgaggaggctgtggaagctgtcaagtaggagtggtttagtgaaaggtgtgtctacacaaggtatctgacaaggccatggcagccgaagctggctgtactcttactgtagcccttaagtcagtactaattcctcactgacttcccacctagttcgctgctctgcaggggtccagcctactgatgaacagctgcatcttgctggtcaggggcatcattctcagtgcttcccctagatactgacatgcttcaagtcgtcacagcacctactgcctagacacacagccgaagctacgctaacctgatggtgatgcaaataagatagaggtctcagctcagtgagtaattttggtattaaaaaactactagctaggcaccacttcttcagactagggaactttctggactgttctctgtattagtgcagcctgtttcttagggaaatcgtaacattaacatttcctatttttttttttttgagacagggtttcccagtagttatggagccagtcctgggacttgctctgtagaccagactggcctggaactcatggagatccacctgcctctgcttcccagtgccaccaccactcggctaatcacaacatttctaatgccacactttcactttagggtacaatgtccatagacgatggaggaatggtcaagttctaatcaacaacagatttacccatagtcttaagaatcttcactgccactgggcttgggatagggaagcttttatgtaagtatgtaggcatgaatgttcaaaatgtgcaagaccctacatataaccagcctcaaaaaaacttgtattgcaacagataatctccagttaccatatagacccaaacagctttaaatactgtcctattacttctgtcttttggattttcatgagaacaaaggtaataatgataactgttaacagggctaacataaatattgcctgtctatctgttatcacgtaatatacaaaggtattgaacatatattgcttgttttattgtcacatggttattggaggggtgggacaaacagagtcatgagaagggacatattacttggcaggagtaatagtaaaacatctctacaagtatccatatttcactcattagtgtttaaaatttcataatcaaatcctagaattgggcaatagactattgctcatttcacattcaacttttaggaaggccaggattcatttcttggcagggcaccacttcacaccccaatactggagaagtcatttgtcaggagtgaaattctctctctccatttcctcacctgcaacatgggcactaaaaagtaacccaacccattcattagaagttgggagacctaattgaatgagctctttagaacccttccagccctcactttggatccgaactattaggatagagggtgcattaacaattggaaagtgtggcaaaactcctttcacagataacaggactatgcccatcagagctcaaattcctctctgatgccagctcagagctgcaaggccagagaagggaaataacaacactccaataagacttggcatttacaaatgtactttcagtgcttggataaatctttgcctcactaacccaacagtatttgtaagatattcctggcatgctgaaagctgcacagccctgtcatactgagagaaatacctttttcataagagtgagcaaagcatcccccaacagctgttgaggtgaaaagcaagcactaaacagagctatctgcgggttcgttggactctttaacatcctaatggttttgaagagaggaaaacagtttgtaacagcaggaaaaatgactctacttctaatcatgtctctaagactatttcctacaaatatcaaatagaaaaagtccgatcaccatggagatgtcactgtaaggtaacagaagccaccaacctgtaactccagcagttctcctataacctgctgtctacccttaagatttcttttgtctaaccatctgctctcctagccttttttcccctagagaaacatgtccttcttgcactagaaatgtaggcactaaggagaaggagtcagcaggcatggaggggtaaaagagagggtaatgggaagagaatgtgatgaaaacacatgaggtatgttttagttacttttcctgttgtgtttataacatgtcaatgtgtcctgatataaaaacaaatcttagggaagaaagccttattctggatccccgttcaagggtccatccttcatggtacagatgcctggtggcaggggcatggcagcaggtccagtcatactcagagagcagacaatgaaggattctcaggagagtgtactcctttttacacatctcaggacccaggcaagcagtagtgctgccttcctttgtggtaggtctgttcacctcagttaatataagatggcccttcacaagcagggccagagactaacctgatctaatccttcccatgtgtgcttgcaggcttgtcccctaggtaatccaaccaaatgtgatttacaaacagaccatcctgtcacctttgtcctcaaatcttcctacaaaaaacagcttagcttcagcattcctaattcgtctctttagtctactacaatgcagcttctcattcaatgactcacataataataataaaaaaaaagtttgacgtgagcccacattgtcttcttgtactaaaaccaatgactgtgtccttgggtatataattcaggtgctgatgaactctcatgatcaagactcctagaatgtaccacctactagtgtatcttcttttcttttttaactggcttccctatctgttacatatcacccatcttctactagtaactcaaacgaggtaatattcaaacataggttttagggcactgactagctgaagatatcatctccttgagtgatctccagcatccccttagctacattactgctcatttataatgatgctgtctgtaccatcctctacctgagtgtggtcctcaatccctgaagcaagcacgcagcatctctccttgcttggcttatatatctcaagcgtcttattttatctccctccatatttctttcacaactattacgctgggttagctctagaataggagggaaggtggctccaaaaagagaaacaaaataaaacaaaatgaattttacagaagcgtaaggttctggtcccagactgtactttcacagcagattcaaagaggaacctaagtgcttctaagagagaaaataaaacaaaacaaaattcatgtgactcgggagactgtcaagaataagattgctggtaggcttcttagaaaaagtccccaggagaagaccttggagtcatgttcttcatgttctgggggaaaagtggatgcaggattctatcaggacaaactatcaattgtcagaaacgagtaaattgtgaacttccaccctgaaactactactgtacttactctattgcatggctcctagaaagttctcccacaatataataataaataataataaataaacaccacaatataaatgatatcagaatagcaaccaagggaagtggcactgcatgggaaccttgacagagaaagctaagatcacctcttccatcattctaggtagcagacagtggctggagggataacaagaacctggcattagagaaacatcagagagggcagggaaggtgaggcaggagagactactgttgccccgctacatgccttttctactgtgttatccacttttgtccatatctacaccaaaaaaaaaatcgtgtttgacaatctcatgcatttatatcctgaattttagccatttccacccactatgcccctctgccatcctccttcctctctctccactggagcccttttctcagcaagtccactttcatggctcctttttgtgtgtggcccactgagtttaattagagctccttgcccaataagggtgggggttgtttaataaaagataatacaaagtgaaatgaattcgaaaggaagaattcatgtgaggaaataagtggatactaacaggcctgggaatgcttaaactgatccgatgactgtttcctctgcagtgttacccagaagaccgaaggacaatcatttaaacataaactaccaaaatagaaatgagcttcaagtgcctgtggctgtgacactggcaaggtttgtctccattctaaatatgaccaatgtttcccaatacattcactcagttacttctaacttcaatgtgtatttccctcatactttgcagtgaactgaggttaaaatccagaaactcacttgaaccttgaacatttagcttgatcttattctattgacattaactttgcttttaggagctgaaacctcttctctgatgatttcaaaatatcttggttttcctgctgtcattgtttgttaatgttttccaggctgttagatttattcaaggaagaataaaaaaataacattaccaggagtacttttgtttctaatgttggacatggttatctttgttttaggatggaattaagaaatattaaggaaaaaattatctttttatgtctattcttctttaatagctaacaacaaattctcatgccctgatttatgcacaattacttgggagacaagatttctatcattttttatttagttttgcacgtgcaggtgtgtgcaatatatacacatgtccacacatttgtgtgtttgtgtgcacgtgcacacatgtgtatatagtttagtaatctgaacattatgtgtcaagcacttactgaaccatctttcaggcctaacatccattctttaatgactaaattaattctgtactctctactaagcattatgccttattttagctgtcaaatatggacactaatattaaattttcccacaaaattagtgactttatggaagatcagagtggcattaaagtgggtatttatggatccttactctttggagattttcatgtaaaattttcatagctatatattcccttgggctttgaatacattgtgatccttactgcacagtaagttatgaaaacatgctgccgttgaagccatatggtaattagtggctgcagatttgggaaaccagtagacactgttcactactgaatgcctcattacttgtttcctttattacctggttcttctatggataacatacaatgtaaaatacatcatgggcttacataaatgttacaacactgaatggctgtgcatacctgtgcatgctactgggcgggcaagctagagattcccattagcagtttaagcctgagaggcaccaagacagaacactaggcctggggccgcagctcagtagagaaaagcttgcctaccctgtgcaaagacttggctttgactgacccagaggaacaacccaagaatttcacatttcttataatagtgtggaaggaaaacacttcgaggcacattgagacagggctttgctctgttgcctagactgccctgagctcagttatctttgcattctcctcaagttctgggattacaggtgttcagccacatgcatcacacttacacttttaaaagagtatgaaagtgtataatgtgacatacaaacattatatgacagactgtgtgtaaatgaggttgaaattctgcaagcttacatatgaattagctacttaaatagaagagcttacaaaaactcttatttgtttcctccccctcctcctgctgcttttttaaaagactgagtctcaagtagctcaaattggcctcagctgtgttacatagccaaggatgacctttagataccaatccccctgcctctgtctctcaagttctgggattacagatcggtgtaccaccaagtctggcatcaaaaaacacacatttgtaatagaataaagagattttggttagaatatcgagtcatccagccagcaacatatgccatctttgggagaaccactgcaggtaaactgtatgagcttagaaacaggacctcaggcttggcagcaagctcctttatcagatgagatgtctcacaggccctcagttcttattttctctggatctatatttgaaattctcaacatcatcactacaaagaacctatatttccgatatgaattcattcatgctcagttgtcacttaataatcaaaatgaaaatcaacctcaaaatagtgacaactaattccatgtaataaaacagagaagggggggctgggctccatgttcacctatagtacttgcaaaaaataaataaataaatggggttgtagtacttgccaatcattcatcatatgttcttcctttctttcaagattgattgaaattattttatttcagttccttgcactgccttgtttattccatgctcttactggagggccttgacttggagtaacagtaagccgcaggcccctggccaaccttaatgtgtgtttcttagaccgattcttagcaccatgtcaaatatccccaaggtctttaacttagagtaccatcacatcaaatgattctgatcaactcatgttctccttcctccaattcttcaagcaatgtggggactagagccaaagaccaacaaaaaggactttatagattattttgtaaagttatattttcataacactgtagaactcccattcactttgggaactgttttggtgagttaaataatataaaaacaggctttagcaatcttctggatgtagcatgcaaaatttgcatccattcacactaatctagggtttcatgtgtctgtaataacccgtcactttcaaaactcagtacagatgaaaatttctgtgccacagtattaccaggaggcttaaaacatattttcattgcaaatatgctaatgtttctccttaggagactgtgtgaccaagaatgggaacctgacctcactctcacacaggaaattgctgtttgaaatgtagaaaaatgcatggcgtttaagggggtaaagcctgtgttgattggacacttactgcattgttattgtgttaaataaagtatctacaagatcatattgagttctcacagcaaatgaaggaaactgagcaataagagatgagtgagcctgccatacaccagggagtcaaggccatcttcttgttttattctgagttggtggaatatctggtattgtctctctccttactctccaagtctgcaagctcagcatggccataacttctactgagggaagactacaactacattgtctttcaaatggtgaacaaatcagtcaatgtcttcaagctacccgttgaacaaacattgatgcaatgagaggcaaaaatgagatgatgtaagagttttgtaatataaaagttctcacagtaaaaacagaagtaaagttataaagattacttattattgtcaacaaatgatccctttttcaagatggtataccataggtttctaggtctcgtggttttattgactcttctctcccctcttcacaagaattggaatgtcatttttcccctttcttccttattgtgacattgcttcaccttacccaggctggcgtagccacaacacttcaggagctcatgtcacccatcctggacttttcaataatatccacagaaaagatacagacttcactttttagtggtgattcactaccagtctatgcaaagtagcgacctaatgaccttggtttagaaatgaaaagatggccctaaaggaagacattttaaaggcaaaactaggatttgaattccagaaatgcaccccagagtttgaactcaactacagcaatacacaccttgtcatggtggagatattggtctcacattcaccctgggttccacctcttgtaaagttgcctatctttgccttgggatctgtaagcttccagaactgcctcatagctgtaatttaacatggttttttaatatcttataaccaaaggtggactcatttgaattacaaccttttgtttgagatagggtttgtatagggtttctctctgtgaccacggctgccctggaatttgctttacagaccagcctgccctagaactcacaagatctgcctgcctgtgcctcctgagtgctaggattaaagatatgcacccactatggccagttgaattacaatcctttaaacagtattctaacctcctaacagatgaaatgtctgttcagattaaatcatctataactgttgtactttttcatgcttcatgcttcccttggtgggaataaaatatagagtaatgtcggactattttcttgggctgcacttactcaccacctttctttcttgttctgtaatagctacccttctggaagcataacttctcaaggcatacaaccaaatggattattctattatgcttaaattcatgacaacttcagttattaacctctatccttctatttctaccatctatttctttaagaatgaaactgggaggaatctatccccctacttttttgccttactttctcctattctatcactaaccacatatacgtcaaaaacacagtgattagatttgccactaaaaacatagagatgtgatgactgtttttcttgtttctaggaggaaaaagttcaggagttctagttgtatcaatatggggacttctggagatagttttgactactccaactacttttaaatattggattatgaaagaacttgactccatgtaactggccatttcttatcataaaccataaaagggcagaaaagctttggtggattttcccttataatttttacctacaactgggtggagggaggtactaacactctcagaagaagacagtcctaatgttcccctattgtgaatgcacaaaagctgaaagtaacaacatgtcatagccatctccctccttcaagagccaaggaacctgcagtgggagccatggttctcacactgataaaaggtcaatacatttctacaaaaaaatgaagtgatgctgccacagaagtaaatccatttctacaaagtgttgagcctaaaaggtaccacatgccctaaagataaaaaccaggatatccagatttctaccatctttcctggaggcctcaagcttgttcttctagccttgaaatagtgagtctcccagcagtatctgaaggagttaagtcaaaaatccaaattggggagtaagaagttccaactttgcttgactttatcaatattgcaaagggaatgatgtcattgtttgggggttctgcaaagacattccatgtcacttcagttttaataccaggctggagccgctatggtctgccagcatcagcagataaacaagacctgtagtctttctattcatctctggatagttactcagaaaggctctgcaaaatatgactattgggaactaaacatttcacttttcattttatccttgtgccagaagtccattcctcggataaacactttacaaactgacactctaaaagtcactaaacatgataaagtatgtgtgcatcagtccaggactgattgaaaattctctctcccatgatgaacgaacagttagatactatacgaaacctttggaacctaacagctacccccttctcccgcctcttttgttttgtctttattttgcatgaaagattatttttccatgtcaactcatttgttatgcaatcttggctttggtaaaatatcactccagcaatattacatgcagaaatagtatttagttttaaggtcttcgaattaaaattcttctaaacgtttgctttcttttctgactatcacttccttttgaaactggtggtttccaatgtctctgcttatatttaaaattaaaatattaagggagggagaagttactatattttctttaagggggtggcacattcctgcaatcacttgcaatcccagtactcagactaacttgggctaaatagcaaaatcctgtcccataattcttaaaattaattttaaaagaccctaagaggtagtttaagtaaattataaggcatacagtcaaagcttcatctcatgataaaagacattaatttattacttcaagagaattgtggtcttttccacctttcaattccttgacaattttgtacaagtatataacgtatccaattcataccaaaccccttactcccttgtatctcctttcactcctgctcatcacccctaccttcacagctactttgcctcctgccttcatactattttatgtgtgcagacctcagaaaggtagacacagtttctgtgatcacgactgcaatgtccaggccctctcaggcccagaaagcagcatgtaatagcacagcacctcatattcgaaaccttaactgttccttcacttaacaaattactgtcttatgatgagattagctacacagctcagagtatggctagtgcagagtgcggggctaaagagcttacagcctggagtcaatcttgaacccaaggaagggagggaggaacattaatcggtcacagttcatctttatttttaccatcccaaggaaagagacttctattctgaaatgttttacaaacagtttgaggagcttggcaagacagctcaggggtaatgtctttacttccaagcctgacaacttgagttgaagccccaagacctgtatggcagaaggagataatcaactcccacaagttgtcctcagccttctacctgtgtccatgacacttgcacacccacaggcctactccagacatgtcctctttttctttttctttctctctctctctttcctctctcacatacaaatgcacataaagaaaaaagattttaaaaacagattatgtaaaaatttcagggacacatgtacacatatatacacatgtatacagatgtatacacatgcataatttttatgaacacaaaacacaagcacctctaactgacatgtgtaaaatgtgcacaaatgccagaagatggtgtccttgaaggtatgagtggctcctccctgtctgctatgtgcatgtctaccaggcattacaccttcctggctttgacatcctctacccacaaggttacccagactgtagcacagaagaaagtaagttcctggacagaatagtctaaatataatttaaattttacttttaaatctcttttatcagtttaaatgatgctagaaataagttcagttggcaacagagcagttctgcggcccattctttttctctttcagagttaaggccatcccagattgattcctgactatgaatttagagaaagagaataattcaaagaaaacaagttgaaattagccatcatttttaaagtagtagagattccagagtatggagccattgatttttacagcctctgtttcctcactccttaaacttagataaaaggacatttattagcaatctccatatttctatatttaccacctaggagctgacaccaatactaagccattctgtgggaaaaggaaaacctattctgattgttgacgtacttccacaatgaaagaaagtggttatgttaattaaaatgaataaagtggcagctgaaataaacacaaagttggaggatacagtcagtctttacaacacattgcttattgaaataagcaactttccagggtttcttgactccccacaggaggccttaccctttcaaaggagtatatgggggtgggttgggggaaggtggggggaagagggaggaggaaagggaggtggaactgtggttggtatgtaaaatgaataaaacattttttaaaagactatatgcaaaatcagcatcattttctgtctgagcttggaagatggctcaagtctattctgtagatgtccaggagaactgctaagttcagtcatctcgcctattcagaaggggtgtactttattcacataaaaaaagaactcaaggttccatctgtagaatagaaaatgtgggaatgcatttttagtaaataacactatcatgctagtaaatggaataaggaaaatatttaaaacgcgtatcaaactttctatggcatattttatttagttatgaaataataaaatgggaaaaaaatcagggtatgtaatttagacaatcattaaaactttcttgataataatttattcattttggaagatattttataaaagatacagcacaaatgcctgttgggtgtgattgtttttcaatacgagctcacactgtgctcctgtgtgcatgtgtatgtgccaatgtgtacccttatgtatatgtgtacctgtatgtatgtgcatatgtgacagggtatgtttctgtgtgctgtatgcatacatatctgactgtctgtgactatgtgcaccggtatgtgggtatgtgggtatgtgtgcatgagtgagtgtgtgtgtgtgtgtgtgtgtgtgtgtgtgtgtgtgtgtgtgtgtgtgcatgagtgtgtgtgtgtgtgaacaatgcattttttacttcatttctttctatacgtatgccccatctgcatgtctccgagtggtgtgtgtgtgtgtgtgtgtgtgtgtttcaataaatctttccgccaaaagctgcctgagccccaccgccatgtgtgtgctttacgccagccgcctgcccgagttaggcccaaatgaatatacagaaacttgtattaggttcaaagctgcttggccattgactaggacttctcatctgttagctcagtcttaattatcataaatctatatatgttataagacttatctaatcggaacccttaatggtgtccctccttgtcggtggatcacattgtgccacaggagcggaggggaaagagggcacttcctgtttctccttcatttaaatatgagtctcgttgctatgtcacttcctgcctggatcatcacttctctactacatttcccagaatcctctttgactcctagtcctgtttaacttgctgtctcattgaccaaacagtattttatttaactatcaataagataaacatacacagtacattccccatcgtgtgtgagtgtgtgtgtgtgtgtgtgtgtgtgtgtgtgtgtgaagttttgtgtgcttgcatgtctgtgggcatgtgcatgcatgtgaattgcacatgaacatttaatttagcaagcatttcatgtagctaagtttctctaggaaactctctcaccaacaatacccaaagaagctgaggcctcagagggcagaggaaggcgagtcccagacactatggtatggttcacctgatacattgctgaagaaatagagcttggctccaatgaaccagtaaggctctgtccatcacccaatcctaccttctctgccaggagcctctgtgacaatacagtgtgatgtggtgcctcaaaatttgagacacttctcttttgacggaggaagggtattcagtaaataaacatggtcatactttatcattcccacgtctgaaccccaactcagcaatccttgttacttacaaatggcacttatttctaaaatcaagtctgtcaccaggccatcactggatcactcacagaacataaactaagtcttcttaagcattcaccatatcacccaaatttaaataacaaacaagcaagcaagcaaaccaggtattaaggtgaaaatgcctttaagaggctgtcaatacataaattgaaatgaaacatcccaatgtattttctgtctcaaggtcagaaagggctaatggaagactgggaaatgaagaccaagattgtgagcacaaacttacacaaacagaacaagtttgtttgttctaggtcttatccccaggatggatttcatttggctcatgataacatggtacatagaaaatgacaagaataaagataaaaaatagaaagaagatgagacactgtgggtctaaatgagcacaaattcggctcacctttcaacgggttcgttgagtgaactgacacatctagaacccagctgtaacgagtatcatgtatgctttgtctcagttttagctgactgtaaggaagtcaagtcaagaacaaaagggagtgtcataaaagaccaaggctttgagttctcatgtgatccactaatgggggtagcaggtatcagggtacagaatatagctgaggctttactgtgctacaaaggcgacatggaaatttagaatctggtgaaaactgaccattgccccataagcctgagaacagccagtcaacctgacagagtagtgttctcagcacaccaagcaaaaacatttctccttgcttgcacgcaattcttcagaagcaggaacttacttagtactggcaaacatgggtcatggagagtaaatattgtgagattttatttttaactctggcatcctgggagttctcagagtcagaactgttcagccagaggttggtcagaggttatatggcttgcaacatgcaacaaagaatcccagaccagactggagaaggtttctgtctgtcctatgctggttggaggtccacaggagagcaagtacaggcttctaaactttcagtatcaactgtgatcccagaaggatcattcttgtatgtctcccattctttctgttaaacttctgataagtttggccaagcttagctctctgttatactgcatcatgggatacaagaatgctcttcatttttttttctctgccaaaagcctccaattttttcccttattgacaaagtctttagatttgaaattcttccagttctattccaaaaacagccaggtctcttaggcagagcagcaggaagaagacagtggctcacttcgcccagagtgacacttgcaaggagaaccccgggtgcacagcctcttgctctcatggtttcctcctcacagacaattttctaccatcaggtggtgtgtgtgtgtgtgtgtgtgtgtgtgtgtgtgtgtgtgagagagagagagagagagagagagagagagagagagagagannnnnnnnnnnnnnnnnnnnnnnnnnnnnnnnnnnnaaatcacccatgtagctggacaagctgccctacaaggtctaggggtcctgctgcctatgcattgccagcactgggattatagatgcacatggccatcatcagctttccacgtgggagccatcaggctgaactcagacaggtctgtgaagcaggcacctcattaactgccccatctccccaagccggacagccacatgtaatctctgatgatgacaattgtgcaacaagaacacagtagataacatttacgaatcacttacaagtactaaaacatccaccagagagcaggttatttaatcccctttagcaaagtaaatactatttagctgatggtattaacactagtttaaggtctagcactatggcatgtaagagacctggctcaaaagcaaaggcccttagaagggttaggccgcctttcttcacagagctactactgagtgctgcctgggctacatggaattgcaagagaaatgatagaaagatacattttgggggaaatgtcaaatgtttcagataacccattacttatttttatttctaaacattacaatgactgttgtaccaaacattttaccattagtgttttcaactcattgaatttgtgtttgttatgatttatgtcttgacttcagcttttgctttcttagaacttgccaactctttcatcagtttgcctagcacagtatttgatattaactcaagagctgctgaatgtgtggtatctgtgcagagactactaggaacttgccctaataaaggaatttattcaataagattctttcctaaagaggaatcagtgtctcttttgagtatgcttggtagttgtcatgtgtccttgggtgggttatgatgtctagatagggttgagaagtcagctttgagattcggttaacactcaaatcagtaaactttaaggaccacagattccttttacaacatagatgggccccattctgtcagttgaagtccttctgctgaggagctcaagtaggaaggaatgctgtctccagacagctttcagaatcaagattgcaacatcagcacctctggatttgcttggctaactgtagacttgctagattctataagcatgtgaactggttttctaagtcaatttctcagctttccctcagtctcacaaccctctatgcccatatcttcctccagtgctctttctgtagatacattccctcgtctttctctttgttactagtcagtgtttttcagaaaaaaagaaaaaaagattttccctagaaaatgactaagagcagaggggaagaaggagtgaagacagagatggagattctgaggtatttttccaacaatttgtaatgtccctgattacaaatcctcatttcagaaatgcagctcacctaaggaagctcagggattcctctgtgcagttattttatatactgaaatggaagtttcctatcgctaacccttcttttattcttgaaacaagctcctgaggactgttgagtaagatggtggattagaagctgcctccaagcttcagagcaaagaagaaaaatcaggataaggaaaaagaactatattaaaagacagaaagaggggagacattcaggaatccaaaaagtaagagaaaggagaccacacaaacacttagggttctaagaacaagaatgagaagagaagaagtgagcaaactctccaggcccgtgctgtactttgcagcaggaggtggtaaacagaggctcacctaaatacagtgtattttatctttacctctgctgaaaactgagccccagagagaaggccattcaataaaagatccctcaaataacactagaagagataggcaaacaagaaaggcacaaaatgtaacacaaacatgaaaaagcaaggaagcatgactaaaatattgtagctcctcagctactaaattaaaaagctgaggtgggtaaaatgatttaaaaattatgcatgtgtaaaactgacctatgacctcaaggaaatcacaaataaatggactgaaaaacctaatgtatcagtccaagatgtggagagaaaagtcaaaaccagaaagctggcagtatggatgaaaagtttacactaccaaaaagaaaaagataataacaacagtaataaccagcaagaaatgctggaaatggaaagctatataattaaataaaattaaaaaacagtgaaaaatcatcattataatacagtcaaccaatcagaagatagaacaacagggaaggaagataaggtgttgaggaataagactcattatttttatgccaacaaaaaataaggacagccaaaacaaaatccagtttctccatatcttgtataatcttgcatttccttacttcagacccatcagaaacaggtgaagctgttccttacaacttagcaattatgtgtcatagcagcttttagaatttcactgtggacgcaaagtacattcttacattagattccaactgtttgcttgaaagtaacaaaacacaaaatatcctacaaccaattactggttcctaggattaaagcaaacaaaaagttttataaggctattctgagaagaaatattatattaaaggaaagtgatgccttaccatttatgagtctctgtcagggcagcctcttgtgactcttgatcaattttggctaaaaatgcaagaagaagaggtgagataggtacagggctctaccatctcagagaatataaaatcaaaataacatggagtagatttaactattaattctaatgttctctagccagatattatcttaaccctattaaggtcactgatattctagaaatattaataaattggattaaattgacactaatatgtagacataaaagattttttttataactaaccaaaggttttatgttttggataattgatttgcctctgacacagtgacctaagggatggatacacttctcatatgccaggacttaaagatcaacacattgttgaaaataattctcccaagcacagttacaaccatcaagttggaaatgtaaacaaatgaaggtgatacacattttaaacttgttgtagtcatgtgtttggggacagatctcaagtgactaaaatgatcttctctgaaaaggggacataattatgcacccatttttctgcaatttttgtcagagctggggatcaaatccagaacctctcctgtactaggcaagtgctctatcactgagctccaaactcagctttcatttgttctatctttccctactctaaaaataaagatgcctgacattaactcacggatcagacttagaataggaatgaaggtatcaaattacttaaaaatcagacagtgactccattaactaaaacatatgacagcaactttcaccttctatgagaagtaagaattccaggaagttatggaaatattctacaactctcctctcttcatcatgcgtatatatttggcataaatatttcagagacactattaagtcaggcactcattatttttggtctgttctaaagactgtgaaagataagttatgacttcacaaattaacaatttcatgatttttacccacccataggtagaaaaccaccaagctataggacactataggaaaacatcattatcacacctacacagtcttcataacacctctcccataaaaacagacctgcacaagataaaaaaaaaaaacccactaacaaagaagttgtctatttataatccttccccactgggtaatacttggggccatttggagaaatcataaggcaaaatggaacagggtaagttaatcaactctacaatcacacacacaaaaaatggcagtgttgtccaaataaaacccatgatcccttgggaattgttaaagtgtctctctcactacttaaaacacaatagcacagcttgtgttcattaaaattttacagttttaatgactgttctgactgaaggtctgtacagcatctctgttgtcctgacacagcgtcaggctgacactctctgcagtggatgtcaacatttaacagggatcatttgagttggcagcagttttttttttctcctttcctttctcttcttgtactttagattgtttacaggagtttacaggtctatcattagcagcactgaagactgggaagcacattagacactccactctaaaaggctctagtgtgaacggactatgataaaatccagcctcagggtgcctaaaagaaaacagggttagcttccggaaaagattctagaatcatatacagtgccttcaaggggaaataacaaaagcagcctgaatgaacatgacttcggcaaaggatattttttttgtttgctcgttttcttgaaaaatacacagattaaaagaatttatggaaataatttctggactattttagaaggtccaagtaaatgatttatgaaaataaaagcacatgaaatggatactcccaagagctatcttcaattcccatgagattaatgtgagccacgtgacatttggcaatcagattcacttgtcaaaatatgcaaattatttggcacaatgactacaatgaccagtgcatgtgaaataaatgtcttccttaagttttggaactgaagatctgaaaaaccttgacaggaaccaaccactgttttataatgctttgacatcatatcaagatatagaaaacatattcttgcagctttttaaatatgtatgtccttaaatcatgataaaagagaataaagtgagtcttggtatttcacagtaataatttcttttgatgtgtaccaacacagctcttgtttcagtgcctgagaaagttggcttaaaaaaaattaaaaaccaaaccactttaatccaatgtggcaggagattgatccataccaaagaaataaaacataaaaacagatctccttaccaaacctaataaccatgctacaataataaagtcaaattagaataacaggcaatgcttaggacttctctactatccattatttttgcctgattttcaagctacaaggatttgtatattgaaaatctaatcagctttgataaacagtcaaattagagatcaaagaaagcacattaaaggccaaatttcaacccttaacatagagtcaacaattcaaggagcaggcagatttccttttgtattgtaatctgaaggaaaaaaaaatattctgagagagaggcatggtggcatagatctattatcccaaggggccagattggggtttgagggcccaaacttcctggcagtctgacctacacagtgaaaccttgtttcaaactcaagggctggggatggagctgaatggtagggcacttgcccattatctgccaggtctttgttcaacataacaaaatgccttaaaagttggggtgcatacttcatgtagtacgaagctttgcacaaaaatgcaatcaatgatttattgtcagagtctccttttggggtcacttgtacaaacactatgacatagattttgacgctaactaggtgacactgcaagctgtggctgcttggggtactgaagatgaacccagacaactgaaatcaaatgtgattttaaccagggcttggtggcgcacacctttaatcccagcacttgggaggcagaggcagaggcaggcagatctctgtgagttccaggccagcttggtctacagagcgagtgccaggatagactccaaagctacacagagaaaccctatcttgaaaaacccaaaccaaaaaaaaaaaaaaataccaccaccaccaccaaaaaataactgccttcaccaagaggttggggagggtacaagctatttatgcacagtgaacagaatctcagcacaggtgcatctgcagagacactcactatgactttgctaaaggtgatatagaaatcaaggcaactttctacatgtaccacaaacaagttatatgaatatttaaatttcctgaagtgtgtgtgtctttgtgtctttgtttttcctgagatataaaatttgcttgtggcagattggtgagatgactcagtggctggagacgctttactgtacaagcctggtaacttgagtttgatccccaggagccatgtaaagattctgctaaattgttccttgaccctgacacacacacacacacacacacacacacacacacacacacacagcaagtaaagtaaaacaaattatttggaggtaatttttaatggtgcacatgattctgttaagagttttgaaatcttgggtgtttttgtggagatttcctatatatgtacaatcagctatcaacaaatgattaaagtatgagcaagtaatcacttaaaattatttacatttcagaattcatggaagactccatcccccattcttcagagggaatagctcatttcttttttaatacatataacaacatttgggaaacaaaccaaacaaacactaccactaaacttcctaggaggcagctttcatcttttgctttcttttatttgtgctcatttattttagcattagggtgtaagcctatcctcttagtctgattctaccaaagcggccactggcttggatggttctgggccactgagcatgcaagcagttaaaaccagcactcctgaggacatcttcacaggcagcacggatgcggcttccccccaacctctggccccacaaattattcctggtgcttgctgccctactaagttagtcttctcacccagtgattggtgtccctggtctctgtctggctccagactctttggcaatgtgagccatttctcctgaccttgttccaaaagactgtgagtaagcaaaggcactgaacggacgccctttctgaacttcagctttcatgagggaatgccacatattcccaggtaattggagacagagttgcctctgagtaatatcagatggaaggcaactcagggccctttcatctacttgtctaggctctaaatctttgcgctatttttccttttatttaaagtgttaactagttttgtttataattagctatgaatgtgcatttgggtcgcttttaagtacagccagtatggcttattcctttagacagatgcactgcctttcctctgagtcatccgaggttgtcatttagccgcaaatatattgcttttggttttgtgacttttaagacactcctccttttgacaatgtactaaaagtcaagtaaatctgggaagggttgacatgtcacacaggatgattctgtgagtatcttccattagacagcagaagaaagagtcaagcctcacctcactgcactccctgccctggtgctgctgaagcttctaggacaataaaacaattgctctagaatggcttcggaggagcaaagcctgtatctggaaatactgcattaaatttggcctttacagtaattcatagctacctgttagtgctgaggtcatatcaacttttcatgtaaaatatgtatcattttgtccatatatatatatttatacatatacacatacatatgtatacacacatacatatttatctgcaaacataaactattaatgcttgttgttaacaacacatacaattgaaaaccacacatacttagaaagtttgatatatgtggcttttagcaaaacccaaactacagtaaagccattacagaacttgatatatattcatctgaatgcttccaaatattaaaaaacccaaagtggacaagacttgggaaaatattcaatgcacacacatgtgaaacactctgtcaatattgctacaagagttgtctatttccaactagaacaattcttaacatcacctaacttcaaaacaaattatacctggaagtggtgtgttactccatctataggctttggcaatctctactcaacttccactaatgtagtataaaaatgaagacacacccaggcctactcctgtctcttcctttgccaagaaacaactatgctaccaaaacagtcaagaatacacactgataccaagatgactctaaatgagcacccctcaggtggaaaccaaaacactataagccatctgttaaaattgcaaacacatgtatcttagggctgagccttcaatattaaaagcgatatccactaagtctgactgctgtatctgaaacatcaaaatataaaacagctggaaataaaaatctgaaaaccataaaagctcctccaatgtgttttcttttcttcctaacattacttgccaaaacaatgtttgaagatgagggcatttcaattctagaaatcaaagccacataaatgagcattccaatatttcaacaaatatttgcgcatctattgtgttttggggattgtttattggggttcatgtagtatatttgtatagacctttgcatcaagaaaatgatcaatggggagagagattatggccatatattagacaacaacaatagctatattggggtaccacatcccatgtgcataatactaggctaattttatatgtaataacctacaataataaaccccaatgaggaagttcctttattacagtttacagtcctgcaattaaaagtgaaaatgtcacacaaggtattagaaataaatattacttgaaagtgacaggattcaaagtcatgccaatggactccaaagttgtaatgctgtcaaatttctcgtgagcacagacaaaccagactctgatttgcttactgagacaaacaccaatgagcaggaagtgaaggcatccgagtttggactacaatgatgaggaagtcctaggcataagaagatatagaaatctgagagtgtatacagaaaatggtaagaaacaaggttctgaagcaaacactccaggtgttaagaaggaaggcttaaggagagaaggtgggaagcatgacaggaaattgttgaggacgatgggctgtgatgtgatagcacaaaaacagagtgaagtacacaaatgtactcagtttaaagtacagagatgcacttttcaagcaggcatgcacttgtggacattgctggggccatctttgtctggttctaatctatcgggaaagtggataaaatgcataagacagtagttttcatccatgagagtatggggagcacagggctgggagctccttagtcctccatctctctacattgctttctaaaagtcagtgtccagactatgggccctggaaggggcaactcacagaagctcatcaccttgggggagttgcagaaatccagatgggactctaagaagttggaagtggctgaaacccaagaggtagaggtccagagaggaaatcaacttttcataaaagcacagcaagaaatcacccccaaggtctttcagagttttgttaagtattaagtagcatgtgtctacgatagaatactacaaacccaagcaaagacctgctaaggaagaaccacccaaaaggtccttcaaggtcaatgtggaagtctgaagagcccagcagagaagaggtatagagtagccttgagggcctcgagcaggaaaacatcatgttagcacattcacagtgatgtttcctcttgattgcctaagcaagttttaaaaagaggccttacaaggcatcagactgaatcatgtatcatatttaaatgatatgtccaaacaaagtcaaatactttgaatttgcattaggcaaagaaatgtattgtattttatagtctatagcaaaaacacagccagctctgcaaatacaaccatcagcttccaccctattctgcatatatgaatattctgtaaagctgtccaatttctcatcataaactgaaagcagagaagaattaattatcaaattgtgtgtagaaaaacacacatacagctatgacttagtatttcttaaaggattggttcccaaactgtcatgctactgacagacagtagcacttttaggaagtgggcctaccagagggagatgcccatggagatatcagatactgggacaaaatctttcctcctcctccttctgttttccttttcctctcaaatgcagaaggcacaccagcttcttctgccaagcactcccaaagaacagggccaacatgaccttgaaatgaaacctcagaagccattaatcaaaataaaccatccctgtgtttaaacgggtcacctcaggtcctttgtcacattgatagaaagctgtctagcacaactgttcaaaaatagaatctaaacaaaactttacaagcattcacatgctagaacaattttgcacctggaaatgtacacactagggagtgttcaaggaaatgaaaccttagatctatataaacaaatgaaaggaactggaaagtactatttgagcatgaatatgaagtgtgctttctctaaataactgactaaaaattaggaataagatattattttgttacaatatatctagaactaaaatgctcgacaatagcaaggattacaggagaaatagaagcctgtcactttaaggtttttgtaccaatgaagattggtatgactgtatttgaagatagtgaggaattaaatgggacagaacatgagagcaatcctgaagataccaaaggctggcagtggaaatatggaacactaaaacatacccaatctataaaaggaaggaataaaatatcatacaggatatatatatatatatatatatatatatatatataaagataaattaaacccgatcatatttttaatcaaactaatggtctaagcactccaactgaaaggcagggcaggattgttagaataaaaactttcagctccatgctatctagtggaaatccacttaaaaatacagacatgtacttagattagattgaaagtcaaaggataaaaatggcatcgtgcaaacactaatcacaataaagctgacatggctgaattaaaattagatgacttagacgttagaaggagaaactttgttaggggaaaaagtcaagtactacactgaagaagtaattcaacagaaagacaaactaattctaattatggatatatctaaaatcagagtttaaaaatacacaaagcaaaaaatgttatatccaaaacaaaaaggaaatgagacataactgaagggtgaagccaaaaggtgactctgccagcacaatgaaaagaatagttaaaatagagagagagcgtctacattgtgtagcatttggaccaaattggacacatagtaccacaatgaactgtaaatggtgatggactcaaagcatcaatgctattcctattgctagagattagaacaatggcaacaatgaatagagactcttacacagccttttaaggttagttttttggtggagagtgaattaaattccaggaatagagggctaagggcatttcatcagttgaaaagctttcaccatgatgcagaagcattgggtgagaaaagaagataaagaccatgagatcattaaggtaggagagatggcgcagctgttaagagcacttactgttcttacagaagacctgagttgagctcccagcacccatatggtagctcacagttgcctgtaactccagttttaggggatccactgccctcctgcatgtatttgctaacctttcagtctcctccatgtatgtagtgcacatatatagacataaaataaaataaatataaaaagaaaacagtaaaacattctaaagtatttagctttctgctaataacaacaaggaagtctgttcagaaattcatggcagactaggccttgagtaaaattaactataaaaacattcaattatttatgtattaatcacctcacatggaggacacacaagcaacattctaaacattcagtttagatgcagtacaatgaaaattcacacactttggtaataatgacagtgacaccctatccttttatggaaaactagaaggttgttcatgttcatgcaataacataatgccagcatgagtggtgttgtaaaggcaagagattatttggggctgggggagttgatgccttggaattggtgtggagtagattcagggaataggaacaaaaagggaaatgagcagagtgaggcagtgtatgagaaaattggcatcatagataaggcattgatccagtagttcaacatttaagcatgtactatatacacactacacatgctgagaaatacacatagttatatattaggaaaaaaggctggtaagtacaaacattaacaaataagtttagacactttgacaatgaaatacagtcatttgggaggacacactgatacaaattattgtaaataatttccaatattcaaaaaaacaaggtaggcctatattttaaacaatattatggacttgccagataagggatattcagggtttctctctctctctctctctctctctctctctctctctctctctctctctctctgtctgtctctttctgtctgtctctctctcttctctctgtctgtctctgtctctctctctctctctctctctctctctctctctctctcacacacacacacacacacacacacacacacacacacacaccccaagaaaaaaataaaagttaacgcatgaatgaatctgacataaaataaggaaaattctctgaggccattaaaacaaaaagggacaggaattcaaaggtgtagggcagcatttcctagggctatcactgacacttagaacttttccttgcatggacaaacaggaaaataatctgaccaaggctagaatcctgcaatgtatctggaagtggcttgaaggcagaaactgtaccccacggattagacctcgtggacatgtgttcaccctgtagtagctctgatggaagtggaaccttctcttcaacatggagctgaaccctcatggtgcactgggctctggcacacaaagtgctgtattaacatgcgaggatagaatttattttaaaataattcttgtttggtagagccttctgatgattacccaaaacaaatataaagagaaatagaaaacatgaacaaggccctagagcaaattcagactgaaaacaaagagacaaaaactgaacccaagttgttgtcaatgcagcagggaacagatgagtcaggacctccagaccactaaaaggaattattgcccttggacccaatgtttcatgattgacacatccatgcctcaaaaaagcaaatgtgatataaagacatttttacacagataagagcaattgacacctgtgagttcattgcaaagtggcttttaaaggacagccatcagacaggagaaaaataacctaaggaggtaggcatgagatgaagaaatggtgcatggagaaaatacaactgttaaactgaagcccaaaacagaatacttaaaacaacgataattctctattttaggaatcacagaaagcatagaataaggctaaaccactgcaaaagagtgacatataaataggtcagattaacagtaagagcctgcagatttgtattgcttaaaggggagcaaaaatagcaacatcagacttggttaaagaattgtgttaacagaaagaaaaatattgtatgatgtcacgaacatgtggaatctaaaaaaagcaaagccaaactccccctagccctcaaatatactgaaacagaagactagaaagggcaaatggtataaggagatggaagtcaaatggtacaaagctgtagtcacaacggatgtttaagctcagataactaacatatgctatgaagagaataagcaataggagagtgaattttagatttgggtgccacacatgcataaagaggtaactttgaaataatagatatgttaaattgcttaattctagtaactgttccactgtgaatatatctaaacatcataatataacagaagaattgtgttataatagcaaagttatacattaaaaagcaaagacacaagggggcaggtggatgactaagttggtgaagtgactgccatacaagcacaagaaatggagcttggaccttcataacttatgtaaaggatgtgtgcactggcgtgtgcctataatcccagtgtacaggaggtggtggagatgaagcagttctagctttgtgagagactgtgttgcacacacacaaaaggtagaaagctattgaggaagattcatggccatgacctctggcctcaaatataccaacatttgcacacaagaatttacttgaacacccacacacacacaccccacacacacccacacccatacccacacaccccccacacacacacacgcacacacgtgaagaaacaggatataatctctgaagcagcagaatgggaaaattaaataaaaataaaaatttcaaccagtttaaggtagagagcatgcaaacaaggccgaaataattctatccctctagtgcctttttgcaaatggcatttcttctatttatttatttatgtactagactggacatagcagccaatacaatattgctgggaaaaagaaatggaataaaaaggaaagaaaatagcagaaaattactaagaaagttcaggaagtttgtagtctatactaaatagttatttgaaaactatgtacattcaaataccgtaaatataattcataaagtacagccccaattgaggtctctgggaacatctgccaaaaagtaaagaccttagccagatgggaagatctttcagacagacatgaatacttgttcatgtatgtagaagtcctaaacacatgcaatgtgctctgtgttcataggatgaaagcatggacacactagggattctggttctcctcagaatgatctatatagatatttgtgtgactgtgtcaagatcccaataaggaacttgatgtgtaaatagttgcaacacctaagtactgaggctcagtgagagaccctgtctcaaaacataaagtggtgaagatacagaagtagtcacaagatatcacaatgctaagaaacatgggtagggcagaaggacccaggaactggcactggaaatgcagccattcttccttctgggaatgaggtctttattggctctttgtaatgtattagatgctgaaggtagtacagcttgccccactctagagaggtgagagatgtgtactatggtgtgttggcaggaatacccaagtagaaagagacaggaggcacttgtgagagactctcagatggaatgaattccctctcaggccttctggaactctgattaattctcatcctcagttgccgaaggggtgattgaggctgttggaaatataacccccacagagaaatggagacatgagctatgttttttcacaagcgttgcctccactttgtgcttctgtcatgttaagaattatcagaaaggctcatggaaatctaaaatggaataatcatgtgttgtgggaaatggctctggctctgtcctttctcactaatagcaattattcccctcatttagctctgctaaggatgatcttctgagtgtaaccgtccttcgccaacactctacagtagctttgtctaccatctctctggattcccctattattattacagcttttaaattaaaataaaatagctccaatcacagccagggcttggctccagtatgaccacagtctaattattgtgcaatttcagtcatcaataagctttctgaaacagacatggtggctcagctctgcaatcccagtagtaaggaggtagaagcaggggtattaatggaagctcagggtcatcttgaactgtattgtgaccttcagcccagtctagactagagtgagacactgagaaaaaaatccaaaagtaacaaaaaacccaaagtaataataatgaagccctctgaactttcatttcaatattataaaatggagaccatcatgcctattcagactactccaaggaaactaaaataaggtttttagcataaaagaaacactatgaaggcctgatgattagttattgtcatactgattaagagccaatagactaaaagacattatgcttctttttcaaatggtcaataacagattattttaaatacccatttttttctttttcattactgaaaaggattcccatttgatgcttaaaagtaaaaaagaagaaaagaaattaaagcaaccccactgcactcctgactgtggagccctgcttctgtggtagacagtaccatttctgatagaaaagcctcagtgctggtggactgccagggatctggcagttactaaccctgctttcagcatctcttcattctcatgtatagtattaccaataccagggattgtatatttaagacttgtggtttcaacacccttctaattataagcatgtgattacagatttatgcgttttcctcttgattcaactcacaggaattgttcagcttcaattcaccatgcttaagggcagaagtgtctgaaacaccatgagatatgggcactttgtgaaaaatcccatttgctgttttttcatttatgaaaggacagtagagacttcatttactagcatggggagaaccctatgccctttttaattaaatgttaaagtacatatgagtcaaagtatgagtaaaacacagtgaagtccaggctccattttgattctcataggtcacaacacaagcacaatatatatgaaacctaatacatctgaggttcagcagagctgggaaatattacagtttttgtggacagtttgcccaaagtacagcttggattcagaaatcaagaggattaggtggttagaaggaggaggagtgtgttgagttctgaggaaataagaaattgtaagagttcacagcaaactcgattatcttacttttttatgctataaccaaaacaattcacataagaaatttttaaaaactaacaaatgcatcctgatcatacatacatatatgtaggtatgtagatattaagaattaattttcctaatcatatatggcaaaaacaaagccattatggatgccataaaattcagatcatctaaattatcctaaatttgattaaatagttgactcaaatgacggtcatgtatcagtactgtagccccacaatactattttaaattgatgcatagcaattccattctgcttcctcacttgttttaaatgttaaaacttacaaatttggtttctgctcatatgaatccaaaaaatatggtccatccagtgaccttggtagaccttcatatatgccttccaagatgccattcaatacagttgcacattgagaaaggatcatttgcatcttgaaagtcttccaaactcaggcttcaactacaagagagcctgttaattttctttcctatctgaagactaacacccatgggagcttcccttcctctgcccattctcttagaataccgttcacagatctgttttgttcttgtccttggtaatcttgaccactcaataatccccttgctcacgatgtctatttatcaattgtaggactctacgctgagtccaacccatactcacctgctcactgggcatgcacacttgttaacttacatataggtactcacatttcactccattttccccaccccctttgaggacccatccccaaagatttacaagcccaaacattccaatatctgataccactgctcgaaaaagtcagacttttggatcatttcagagagcagacttttgaaatcttaaagtggaaaaaaatcaatgccaatatttcacattctaacaaatggaaaaactggaacactctggtcctacacactttggatgaggggcactcaaagcatcattaccctctctatgttattgcttggagatactttgtcttgtaaatctgaactcttggtacttatctatcatctatgtccatgtgtctcctgcttatgataaccagacaaatctattctgcctccaaccccatcacttcatcaggactcagtttctcctttctctggtcatgtaccatgacagttggataaggaacctccgtcttcaaagactaatctgcctccaattaagcttttcccatgtttgctacaggaatatcaggagacagcctaagcttctcattcagagacacatggactcacaaagtcgactctttgaagctttctcagccttatcattcactgctcccttccatatgatgtggctcctgatttgctcctgagtccacccctttccattctgcattcccccttctttgtcttcaattgtccatctatctagcatccttctaataataacatatcacagccactaaaaagatttattgtctacgtaggtatacctttggggcccttctgctctgtaagacaatagatttcttgacccatggaggagtatccaatctttagtgggtgtggaaggatctgccttggatagggatagggtatccatttgactgtattggggggggaattgaacatatgagttcaaatggtctgtcactgtatctctgattatgtgtgggaattccaaataaaggtgactagagtgctagatagaagggctagaaaaaaaatccatgatggcttaagaggagagaagataagcagtttcagaagaagtctagaaacctaattttccaaagaaaaccttacaacattgacctttggaaaccaattgcaatagtttcaggccatgaaattaagggggcattagattccttgtaaggactatctcacattcccattcactgctatagaagaaacagataaaaaccaagaaaacaatggtcttgaggaagactgttggtatcagggctggagagcaagacatgtaactgggctggggccattctctaagagcacagagagaagctgacaaagctgctctcagtggcacttctacttttgaggaaagaacaattaatgcagttgtagacagttaaatgttgtaatgaatacaaagctgggcagaggtcgggacatcattagtgaatctacactcaatgttactgatcacagaagagctagcaccttcacaaactgaatgcctcaaatcagcagacgccagccttctccaactgcctattttagagtagacatgagagacatttccaagaaagagatgttgaaatggagaccatgaaatcttggcttgagtagaagtaggaaggcagggaggggaaaattggatgaataagtgggttctgggacgagatgaaatccacaaagattgtgagaatgtgatccacagaccacacaatagctggattataaggataagagatgtttctcttagactgtggggctaatgcaataaaacgtttggccagcattagacacggtctctcttttgaactgttcaagagattttacattagagaattaggcacatttaaacagactttggatacataaaatataaatattctccagtgattaaccagggcaagagctggaatgacacagctatgttaatattgataaaaacctaattataagcaagcatttgacatatgctttgtaggtagcattttctatagttataagtttgattttagagtttggccttgatagctagaagaaataaagagccccaaaattcagtcttataaaaattatgttggcccaacttccacttgcccttctcagactctactggcctggggattgcgacctggtgaacctatccctgtaaaccaagccatccacagtctgcctactttgaggtactagtcccgcctccacccatgggaagaggagagcaattggagtattggaccaccttgcacccaccagaagagaactttggacccatacccaccagaagagggagagaccccagtagcacccactgggagaaggaatgggaaaacaacagtataagaacacattcaacaatagaaagaccaatatgaggccaacagaatattgggactctacactaccaagagctgagcatcccaacacagatgaagcagaagagaatgaccttaaaaacaactttatgaagatgatagagaccctcaaagaggaaatgagaaaatcccttaaagaaatggaagaaagatggactggagagatggctcagaggttaagagcactgactgctcttccagaggtcctgagttcaattcccagcaaccacatggtggctcacaaccatccattatgagatctggtgtgcagatatatatggaagcagaatgttgtatacataataaataaataaaatctttttaaaaaaagaaatggaagaaagaacaaacaaaaaattcaagaaatgcaggaaaagacagccccaaaattgcaagaaataaattaatctcttaaagaaaacaaggaaagccaagaaaaaaaaacaaccaaacaagaaaagaaaacaattcaaactgttcaaagcttgaaagctgaaatagagacaaaaaaaattccaagggaatgatggaaataaaaaaactgggtaaacgaacaggaactacagatgaaagcataaccaacagaatacatgaaatgaaagagataatctcagacattgaagatacactaggaaaaagagattcatcaaccaaagaaaatcttaaattcaataaatccctaacacaaaatattcaggaaatatgggacaccgtgaaaaggccaaacctaagaataatagctttagaagaaggtgaagaaacccacctcaaaggtgaagaaaacatattgaacaaaatcatagaagaaacctttcccaggctgggcattgttggtgcatgtctttaatctcagcatttgggtgtcagaggcaagtggatctctatgagttcgaggccagcctagtctacagagggagtgccaggacaggctccaaagctacacagagaaactctgtatcaaaaaaacaaacaaaaaaacaaaaagaaaggaagaaagaaagaaagaaagaaagaaagaaagaaagaaagaaagaaagaaaggaaggaaggaaggaaggaaggaaggaaggaagaaaatataactttcctaacctaaagaaagacatgccaatgaaagtacaagaaattacagagtaccacataataatcataacaccaaacatacagaataaagaaagactattaagaacagcaaagaaaaaggccaagtaacatataaaggcaaacctatcagaattacatctatcttttccatgaaaactctgaaagccagaaggtcctggatggatattctaccaacactaagacaccatggatgccagcccagactactatacccagcaaagctttcaatcactaaagatggaaaaaaacaagattattccattaaaaaaacagatttaaacaatgcatatccactaatacagtcctacataaagttctagaaggaaaactccaacccaaggaagttaactagagtcacaaaaacataggcaattgataagtccactataccaacagacaaaagaagaagggggttggaaatccatacacaataccatcactagaaacaaatccaaaacaaacaagaattaacattcaatgattattaatttccctcaatatcaatggtcttaactttcctataaaaaggcacaagctaacagaatgggtaagaagacagaacccatccttctggtgcatacaaaaaacacacctcaacttcaaagacacatgttacctcagagtaaagggttgggataagattttccaaccaaatggacccaagaaagaagctggtgtggctatcctaatatttaaagttagtctttaaactaaatttaaacaacatggatgaagaagttcatttcatattcatcacagggaaaaaatccatcaagatgaagtctcaattctgaacatccatgtcccaatagaaaggcatccacattcgtaaaaaaaacattactaaaactcaaatcacacataaaactacacacacttatagtgggagacttcatcaccccactctcaccactagacaggaccactagacagaaacttaacaaagaggcaaaggaactaacagatgttatgacccaattgggtataacagacatctatagaacattccatccaaacacaaaagaatgtatcttcttctcagcaccacatggaatcttctgtaaaatcaaccacatactcagcaacatagcaaacctcaacagatatgaaaaaaattggaataaccccctatatcttatcagatcaccatagcttaaaattagaattcagcaataacacaaagttcagaaaccctacaaacacatggaaattgaacaatgtgcaattgaaatatttctaggtcaaggaagatattaaagacttcctagaattcgatgagaatgaagatacaacatatccaaacttaggggacactttgaaagcagtactaagaggaaagttcatatcactaagtgcacacatgaaaaaactgcagaatagtcacactgaagaatgaacaccaaaactgaaagctatagaacaaaaagaagcaaactcaccccagaggagaagacaccatgaaataatcaaattgggggctgaaatcaagaaagtagaaacaaagaaaacaatagaaagaatcaatgaaagaaagagttggttctttgagagaatcaataagatagacaaacctttatccaaacttagaaaaacagcagagaataaacatgcaaattaacagaatcagaaataaaaaagggagacataacaatggtcactgaagaaatccagagaatcaacaggtcatattttgaaaaacctgtactacacaaaactcgaaaatttaaaggaaatggaaaattttctggatagatatcacttaccaaaattaaatcaagaacagataagcaatttaaaaagacctataaagcctaattaaatacaagcagtcatcaaaagtctctcaaacaaaataatcccagggccagatggtttcagtgcagaactctaccagaaattcaaagaagagctaataccaatactcctcaaactgttccatacaatagaagcagaagtgtcattgccaaactcttcttatgaggctacaaataacttggtacccaagacacacaagggtacaactaagaaagagaactacagaccaatatccctcataaacattgatgtaaaaataatcaataaaatactggcaaatcaaatccaagaacacatcagagaaatcatccaccatgatcaagtaggattcatcccatggatgcagggatggttcaacatttgaaaattcataaatgtaatccaccatacaaacaaactgaaaaagataaacctcatgattatctcactaaatgctgaaaaagcctttgacaatatccaataccccttcatgataaacgtcttagagacatcagagataacagaaacatacagcaatatacagcaaaccaacagccaacataaaactaaatgaagagaaattcaatgtgatttaatcagaaatgagacaaggctgtccactctctccatatagcttcaatattgtacttgaggtactagctagagcaataagacaagaaaaggagattaaggggatacaaattggaaaggaaaaaagtcatggttccactatttgcatatggtatgatagcttacataagtaccctgaaaaactctaccagggacctcctacagctgataaacaccttcagcaaactggcaggatacaagattaactaaaaaaatcagtagccatattatatacaaacaataaatgggctgagaaaatcagagaaacatcaccctttacaataggcaaaaacaacataaaatatcttggggtaatcctaactgaacaactgaaagacctgtataacaagaactttgaatctttaaagaaagaaattaaagaaaataccagaaaatggaaagatctcccatactcttggataggtagaatcaacatagtaaaaatggcaatcttgcaaaaagcaatctacagattcaatgaaatccccatcaaaatactggcacaattcttcacagaccttgaaagaacaatactcaactttatatggagaaaaaaaaatacccaggccaggcattggtggcgcatgcctttaatcccagcactcgggaggcagaggcaggcagatctctgtgaattcgagaccagtctggtctacaagagctagttccaggacagcctccaaagccacagggaaactcttgtctccaaaaaccaaaaaaaaaaaaaaaaaaaaaaaaaaaaaaaaaaaaaaaaaaaaaaaaaaagacccaagatagccaaaacaaccctgtacaataaaggaacttctggaggcatcaccatccctgacttcaaactctattatagagctatagtcctgaaaacagcttggaattggcacaaaaatagacaggtagaccaatggaatcaaattgaaaaccctgatattaacccatacaatatgaacacctgatttttgacaaggaagctcaaattatacaatggaaaaaagaaagcatctttaaaaaatgttgctggcataactggatgctggcatgtagaagattgcagatagatccatatctattaccatgcacaaaacttaattccaaaaggatcaaagacctcaatataaatccagccacactgaacctctcagaagagaaagttggaggtactcttgaacaaattgatacaggagactgcttcctgaacataaaactagttgcacagacactgcatttgacaattaataaatgggacctcctgaaaccgagaagcttctgtaaggcaaaggataccatcaacaagacaaaatggcagcccacagattgggaaaagatcttcactaacccaacatctgacagagggatgatttccaaaatatacaaagaactcaagaagctagtcaccaaaacaccaaacaatccaattaaaaagtggggtacagaactagagaaaccttaatagaagaatctaaaatggctgaaagacattgaagaaagtgctcaacatccttagccattaggaaaacgcaaatcaaaataactccgagataccatcttgcacctgtcaaaacgctaaaataaaaaacaccaaggacagtttatgctggagaggatgtggagaaaggggaacactcctctactgctggtgggagtgcaaacttgcacagccactttggaaatcagtatggtgatttctcaggaaaatgggaatcagtctacttcgaaatctatcagttccattcttagccctatagccaaaggattcacattttacaacaaggacatccgttcaactatgttcatagcagcattaattgtaatagccagaacctggaagcaacctagatgcccctcaactgaagaatggataaagaaaatgtggtacatttacacaatggagtattactcagcagaaaaaaaaataatggaatcttgaaatcgcaggcaaatatatggacctagaagaaaccatcctgagtgaggtaacccagtcacaaaaagacaaacatggtatgtactcactcatatatggatattagacatagagcaaaagattatcagcctacaatccacactgccagagaagataggaagcaaggaggaccctacgagagacatacatggtccccgggagaaggggaaatagacaggatctcctgagcaaattgggagcatggcagggaggggagggggagttaagagaaagagaagggcagaagaggaggcggggaagacatgaggaatcaggaagattgggtcggggaagaatagaggagagcaagaaaagatataccttaatagagggagccattataggtttaaagagaaatctggcactagggaaatgtccagagatctacaaggatggccccaactaagattctaagcaacagtggagaggctctcctaaatgcccttcccctacagtgagattgatgactaccttatatgtcatcctaggtccttcatccagttgctgatggaagcagaagcagagatccacagctaagcactgagtcgaattcttgaacccagttgtagaaagggaagagtgattagcaaaggggtcaagacaaggctggggagaacccacaaacagctgacctgaacactgggggagctcatgaaccccagaatgaccactcagaaataagcataggacagaaccaggcccctgaacgtgcatgtcagttaggagacttgggcagtctatgaggcctcaggtaatggaacaacatgtatatggagtatacgaatggaaactgggagcccattccccatagaggtatactctctcagccaagacatggggggaaggcctaagccctgccccaaataatgtatcagaatttgatgatcccccatggaaggcctctttctgtggaacagaagagggatgggatgggggtcagtgggtgtcatgggaggatgagagggagagggaactgggattgatatataaaataagattgtttctactttaaataaataaaaattatcttaagagaaatattttgacatccatcattctttgtatgtgtcactaaatacaggctcaagagatgagcctaaagatgatcattcattctttatatttttccccatttgatcaactcgttttcccaaagcattttcattattgtccatggtattattcgtctttatgacactgtgggatgtaagatccacttagacacatacctcacattcaaaactacagtaaatagcccaaagaattctggggacactgaatttatgtggctggggattgaatgaagaggctcaaacacacttagcatgtattcaaccactggacaatatcctctgatatcttatttttcaaatgaacaaataatcttataaccttttaaaatggaccagagataagtaaaaagataatataaaataccataagcagaaacaaaggaatacttattatataaacctaatgacaaaaggtgatgcctgccatagtctaaatattttattatcattataaaactgcttttatttaacccagaaatgtacaatgtctaatagctttacttcataagaaactagttaaaagatcatcttgaattgtcattgaaatgtaaagagatatttatccacttagcatgactggaaaatcctataaactaataaccaaattctataggcctctatctataccttgaatcacagatggttatcaaagaaaaatttgtggtgttcctctgtggtttggaaatctaattcctaaattttcagtaacttgtttttttttttttttattcatggtttttaatggctaaggaaggttcagttataaaaacacaatctcaattttggtctaaaatacaaattaacaagccgggcgttggtggcaaatgcctttaatcccagcactagggaggctgaggtaggcagatctttgtgagttccaggccagcctgatctacagaacaagttccaggacaacctccaaagcaatacgaagaacccctgtcttgaaaaaccaaaaaataaataaataaataacatattatataataaatcatgtacaatgtgatagcattatatataacgaatcaagcatatttataacaaatatatacaatgtgcaataaatcatgtacaatgtgtgctcttgtccccattttacatgtgaaatctgtcaaaaggcctgcctttgttttaggtaagttctagagataagaactttttacttcttgggcagtggtggtacatgtttttaatcccatcacttggtaggcagaggctggtggatctctgaggtcgaggccaacctgatctacagagtgagttccaggatagtcagggttacactgagaaataatgtcttgaaaaacaaaaacaaacaaaaaatccagggacttcctacttcttaataagccacaaagtcttactggacacttttacctatataatcttctgctgtcatgtatcatctttttaagtgacacattcttgatagtaaaattctaccaggtggaaaaccagaactcagcctttttatcactaagggaatgagatccccagggttctctgatatctagccacaaggctattgattttggcagaagagcaggttaggaatgaatgagatttctgccttcattcatgtacagttgaatctgagaattataatcactttgattcatgactctcagcaatgttctctttcaatctccatgattaccttcaaagtagtatgtttccatctaaagaaagttgtgcttacgttgattaaattgtgccatgactcattccttataaatcatcgccaatgaaacatgaccaaactatgaaagccataggcgactacagagagaacagacccagtcttcagcatgttatttggcctctctctctcacatgccatgtttgcctttaggagaattcttcaaggagaaaaatctttccaagagtatggcatgatataaatctgatcttcagaagaaatgttgcattccagggctgaaatgtttggaataataaatgctttgatataactgtaagtttcaatgacttcaaacagtggggcaaaaataaaaaaaaaaaacaaaaacaaaaaacaactttatttaatatcttctgaatttttccatcctgcttgcatcttcaggatgtaggaagtattattgagataatatttatagtttttaagctctctgaaaaaaaatattagttatctagaggtattaattcaccccacgaaaatatcagatggtgtcctgaagatttaagacaccaatagactttgtactttgggtacaatgttttgacaaagcaaataaataccagattgttctgaggtcataaatggagtcaaaatgtaagagaatgggttgatgatgtagcttggtggtagagcatttgtctgacatgtatgcaatgatatttagttttgcatcactgaaaacaacacatcagcaaaaagcaattaagaagaaaaacatacttcacaaagcatttaatcttaaaaataaaagcacaaaactatactgtctttataatacaaacgatttaaactaatagtgtgttgttcacaaaacaatctccaataacaatggagactggccccagaattgcatagttagcaaattgttagcctctcatgcctgcgatcctattaacccaagttttgtttgtttggatatttgttgctttttcagtaatgccaaaaataccatgtttaagttcacattgaaccagatgcctgttacacatctgcctccagagggaagaaacagctctgcagtttaccttgactaatgaactgctccatgttttccttgaagggttgcatgtgctcttcggaggagacctggtacactttaccagcttccacctcgcaagctgaaaggaagagagcaagaccatatttagagcaccacattatcatgggaacattacaatgttttttagaaagcataagagccagtgttggaagacccttccatcacttttgttgacatgtgttgtgtgtacacacagtggacctctctgcatagatatctaccttatatacccttcagtgaaccacaaaaagacattcctaagaatgtatacacccagaactaccactcctaaactgatctgttggacaagtgacttagaccttaggactgtagttccttcatataaaaaatgggaaggataccagaagctatatcatcgtgaagttccagggctaaaacctgctaagagctgtgagctgttgcagcaatgcctaatagacagcactagctaagcatttcttctctcataactgtcaactgacttctaatgcaagtttatctctaattacagtccaaatttctgaaaaataaagcaaagagatgacaacctatcagaacagtcagtatttacatgccagcaccagatacttttttacccataatttaatcaaatctttaaagtaagacaagagaggggatactcttggacaaccgaggaggttgaggtttaaatatggtcacaggacggaagagccaattcatatgtcaagttctgaggtgatggtgatgtttgtccttcctttccatttgacaacattgtaagtacctcaggacagatgtgcctggagttgggaaacatttctaagcaagtctctgaagacatgcctgtcactatgcaaaggagtcctctgactcagtaaggggtctgaagctgaaaactataccctggaatataaataacagtagatccactctgggctctggaaaactggtcactacccctgtaaacttaggctgttcctagaaaaccatgtttcccattagtggaggcactcgcctgtgtgtgtgtgtgtgtgtgtgtgtgtgtgtgtgtgtgtgtgtgtgtgtgtgttgtgtgtgtgagagagagagagagagagagagagagagagagagagaggaggaggaggagggagggagggagggagggagggagggagggagggagggagggagggagatgtgtctgtgtcagtgcttcaaggccaggactacttagaacatacttggggaaggaatgggtcagataaggagagagactgaagtcatctgccttggattgtatcataggtgtcagcctatgtttctgaagacagaaacattttgtttatttgttctactgtactgaagattgaacccagggacttgttcaaggtaggctagccatgtactgagctataccctaagccctcttttgagtattttgagaggaagtctctctaagttgctcatgtctgccttgaactcactctgcaggccatgtcagtcttaaacttaagatcctttagtctctagagaacctgagataatgggtatatgccagtcagcttcatgtcttcttttaaatgtctacagaagatgataagcatataatcatactttcaagaattttctaattattttctaataatctaaggtagatcctgaataggtaggccacatagccattgattatagaaaatgagacccaacttattagtgtcccccttaatctttccgtcagttattcctagcagggtcaaaggaagaaatgctaaaaagtcttcaagcagatttgaactgttaagcaatctcctctgtcatctcaaacgttgcttgtcttctgtcctgtgcccagggttcagctctatacattctaacagtcagagaaagatgagaatgcctctgttcatgggagctgtttattctaagccatcaatctttaacatttcttctatctcagtgacaagaataaaaacctgtcacattagtctgtagtggtttacagagtggtttatatatggatggaaacaaaacaacctctttcccgtctgagaggtagagacaggataatcaggagttcaaagtcttcctcagctattaacaacctgagcctgagctagatacctaatgtactgcctaaaaatcaaagcaaaataccattagaaaataggagaactgtagtttccttcatgaagttctatcatgtctgaagatgtacaatgtcctaatagtgctccagcagtaggaaatgatggaaattcatctcacagggctgttgtctccagggaaggggaagagttcactgtcagcaaagcagagccagatcatgggctgtctgcagtacagtcttccaatgttttcattcagcaagtttaacacaatagaacatttaacaaacagcaaatgaaaactgtgggctagggagatggctcagtgtgtaaagacctcgtcatgtaaacatgatgacctgagtcaaacctccataaagcatagtacaacagcaattacctgtgaacctggtattcccatggcagggtgggaaacagagagcactgcatccacaaagctcacgtgccagctggcctggctacatagcagcttacaacagtgtggacctgcttccagtaaggtaggaagccaaaacccaggacacactctaacccccacaagtatgccaggacatgtgtacaccagcattttatatgcaaacacacaacatgcacacacagtgcacaatacacacatgataataaaatattgcaatattttgtctttatatttaattttttccttaaattttataagtaatctcagcatactcttatgaactatattcttagtataaggcaaacaaaaattatgtttttcctctgtttaatctacctcttaccttaagtcatagtagaattccctgtacacaatgacaattaagcacaatttgagatctagaaaacccatgaaagacattgggccagtgtcttggagtttctgatggagtccactcacacctctgccaggggctcttttctcatcaatctgccccagccatcagaatttacatctagatattaaggagatctctctctctcttatagtcaaatcttggtggaatatgcctgggggggttgcttttaaatactgcaagtgttcagaaaacacttgtgcaattcaaataaaaaagaagtacaatatttcagctcaggtcacaatgtaggtttattttctactcctacccaccactctccattcattcactgtgctataaccctagtatgtacaggtgtggactgttaattataactataattaatccacatgtggagatgtttaatatctattctctggtcatggtgaaatacttgttaatctataaaatgccatagttattcaatgtctccatattacatattcacctgacatagtcttggcccttatgatcagttgttggtacctcttacctaaacatatccttacctaaacatatttgggggtcaactgtcactctaaagcaaggggaccaatctttcccccaacttcaaatgtcccttctctcagaaaatattaatgacaaaggataaaagcaagaatttggatgaaataaatgactattcccttaaggcagtgcttctcaaccttcctaatgctgtgacccttggatacagttcctcatgttgtagtgaccccaaccataacattatttgttgccacttcgtaactatgatttttctactgttatcaattgtgatgtaaatagctgatatgcaggatatctaatatgtgacccccccaaaggggtcactggtggagaaccactgccttaatttctaatgaagacttgaacctgaagagctaagctctgagatgtctgtcagaaagtctgaaaaaagatggcagcaataacaacgcctcatatttgcttagttgtgcatctttgtctctgattataattcctgttccctaaggcctagagtgtcctattcacccgagtattcagtgtttgaggtatagaggaaccagaactttacacaaaagaaaatgttacttataggggttaggatgtctttattcagataaacaccagccaagcacaagccagagagagcctcccctgaccacgccctcacaggaggagtcaagcatacctgtagccagctcctaggaggctgggctacagtgtctccctacagttactagctacagccatgattatgaatttctttaatctggacatgctccagtggcagatatcacaatactacaaaggacaccaaagcccaaattctagatctcaaagctcttccttctgagatatttatatttatatttatatttatatttatatttatatttatatttatatttatatttatatttatttgtggatagtttctcaagaaggaaggaactgctggtataacacaccatggtatggcttagagcttaaaaaattatgtgtatgtcttgttctcatacatagtctaacattcaacacacataaggataattttcaggcagttaacacataagacattgggatatttctttaaaacatccgctcccattctattcttagctgtagtataccatttttcacaacatatcattctggctagtacttatcattttaaaaattggtatgggactgcaattttgttaagaacacaaaacgctgcagtataaacgtgaagggtcatttagaaacattattaaaatcagaacaaagataaagttcttggaaaacttaattacagtcaaatccaaatattaaaaaacattagtcaggaggctgttggcataactgagtcattccaattgtgttaacttttgtttaatttaaagcctttgctgagtcaaagagatttgtgtgatgttaaaggattgatattggtaagtatgcattaggcttcccaacaaaggaaaatacagccagagggaaggagaaacaataacctcagatcctccaggataaaatggactccaacacaacgatttcatgtagagagcagtgtggtgtgaggcaggggaatcaccacctcatcactgtcacattgatcatcaacatctctcagcttttgctgaagcagacctactgttttaaggagttggaatattccagtcataacttactggagtctccaaattcaatcaatgttaattacagcctaaaactactgtttttctgtgagcctcaagaaagtcatattaatatctacaacatacacaaaagagaacaaatattttgattagaaggaaaaccctagaaacttccagaaccaaactgtccccctttcctacagaagagcctcatctatacatcattatgggttcagcagagagaggggagagaaaacacacaaatgctacttccagagacctacaggcagtgagatgcagagatgcataccatttcctttttacaagtgcaagagcatatatatatatatatatatatatatatatagagagagagagagagagagagagagagagagagagaggaaggcatagatttaagaactatttaagggttaaaattagcagagctaggctatgagttagcatgcaagtatgtaagtaagtgatctttcatgaagaaacaagctttagaatatactgaggagactatttggaacatacttgtgagagctacatcaaaaccatttgaaaatgatcttcaaggttaaagacccataaaaatgctcacaccatgactgttatgtgggtagcaataaagtagacagggaaagaacgtcagtgatgtctaaagcttgggcgtcatggggacagacatacaaggagagtggctctcagacggaagaaggtaatcttgaatttgttgggcataaaatggcaggagatcgtttatcatttattagtgcctttctatcaggcactaaatagtggtttaactgtgaaatatgccccctgggttcatgtgtttgagcacagtcctcagataatggtgctgtttggggaagttatggagcttcagggagggaggtagagcctttctgggggaattgggtttaagaattaaggttttatagccttgtttgacttcctatttgcttcctgcttactgactgtagatagtgtgacctactttgagccaagaaagaccctccaacaagacaattcctgccaagtacatactcataacaagagaagggatgcacacttgtagaatgagtgtgtggatgagtgatgaggaaccaggagggcaagccgttcttcagctatggagtaagttaatggcctgcgtgggatacatgagaccctgtctcaaaaaaagttacttggtgctccactaccatgttaaattttcaatatttttatgaaccagttaaaattttacattgaaaatagaaatgaatgagtaatactatttatattactgtttaaaaattattcctctaactgaattccttctcactccctcccaccaccacattatatataactgattttgttttttttcttccaagaacaaaggtagcccatgggttgcagctagaagggatatagcgtgtatgcctttctaataactagttggctttctgtacttcagattcatcaactatagtacatgaaaaagtgaaattcttcctaggattgcggtgggggataaataagtaaatacatgtaatgttcttataactagtcccagaacacagaagggctgtgcaaggttaactatcaatgttgttatctgttattgccagagacagcaacagccagaaaagaagctaacttaggggccaagagcctggccctagagagtggatctgcacaccaactctttcatttgctgtttttctaacattgactagggtatgtgccctctaggtttcaatgtctcataaaaatggagaaagtaatagtgcccaattcacaggactttggaaataaaaaaattcatgtaggtaaagcatacagtacagtgcccaataagaggagaagtatgagctagtccatgtaccatgaagctgacacttctctgcacaattattcatgtgggaactcacatatgatttggaaactgagtgctagtctctagatcctaatacatactgaagtaaatgcttcggattataagcaaaaatggtatctatatagggacaatggataagctagactctgagagtgtgtgtgtgtgtgtgtgtgtgtgtgtgtgtgtgtgtgtgtgtgtgtgtgtgtatgaaagagggagagagagagagagagacagagagagacagagagagacagagagagacagagagagagagagagagagagagagagagagagagagagagagagagagagagagaaacagtaaattcgatgttccatggtcatgtataccaggatcatgaaaaatgtgtaaccatggctgacatagaacatgttatataattcaggttagcctcaaatctgtggtaatccttgtgtctctgcctcctcagtatgggaattacagatatgaacaaccatgccaggcctttatgtatatctctaattagtggtttgattgaagcctcaaggtgataagaaggctgaatagtaataattacaatagagccttgaaaaattatttaaaaactccactcttccaaatgagtgaaaatgttaactcttgaaaatggcttcggaatgttatcattacctaaggtgacagacaggcaactatacactagaataaaagcactataactacaaacaaatctacaaactacaattatagtttacctatgcttttaagtatctttatatatgacctttaactgcaagtatgatggtatcatcattagccaaattattagcaatgacttaaaagattaatcaaaaaaggatgtagctcaatgacagagcatttcccgggaaagttcaaagccttgggtgccaagtacacaaatatttaggatttttacaaatagcatcagcctaaattttatgaatagaatggtgtattcccttgcctggagtctaaaagtatttccataaatctttaaatactctcaaatgtgtcctaatacacagtaggaatttattcaaagaaaaccaaaacctgtgacattttctcaggagacggcatgatttcaggactaggcatgaatgtccatcaagggtataaatgccttacgtgacttacactgatgcctcgatttattatttattgagatcagaaactcactattattgaccaggctggccctcaaactcacagagatctgcctaccactgcattccaagtgctaaaggtgtgtgccatcatgccaagctatcctggatcttaagactactggccaggtgcctagcttcatttgggacatccttaaatactgatttgtagtgtaatccattgtatttatggttgtcctaaagacctcagcagttcactgaacttctttggagtggcactattccctttcagttcttactactgcccagccttgctgcacttcaatcatgaaactggaaaaatcacctaccacagtaggccttcatctgcatcagggggtacagcaaagtgtcccacaaagggaagttcagtgagctccagccactaaattagataccacagtgactgtgcttcaggaatgctgtttcactagtgggttccattgtggtaaaaattagtgatggaaatccttcataataaagcatattttctccaaagagtaaaactccctgtctgattttagatatacagaaatgttttatatgtgttctggagattagacccaggtccccatctttgaatgttccaaactgtgtactatgtgacaccgagaacacactcagcatagtacagtggcaaagggctgagaagggctaaagaagtatgaagaccatcgagttcacaacttttcatctgtcatcagaacaaaccacaattgaggacagattaactgcagacacctttttactgccccaggcactgctcagcatctccagtaaatcctgccttgattctttccttctctgcatttcagaaacagacgaccttatgggtgaggctgtctacagatagcttcagggtgggaaaacaacataaaggaaaaatctatcagcattaagatgggtaaaggtgcttgccaccaagcccaataacctaggatcaattccccaaacagacatagtgggaggagaaaagtcaacttctgcaagttgccatctggtccccacatacaccacatgcgggcccatgcacagacacatggacagactcacagacaggcagacagacagacagacagacagacagacagacacacacacacacacacacacacacacacacaaataagcaaacacattttaaaagggtttgaaagccatgaaggcaggtaagaacacattgcaatagtaaaaccaagcaactaaatggatgtcagttgtgaagattattgattctctggtttttgtttgttgtttgtttgtctacttccaaaccacctttctatttctggttcttggacaatggtgacagattctacaaaatacctttcctccttatctaatatcgcagtgttaagtctccacattgaaaagggtcagatggagaaacatggagagggctgaagtctagcctctgacaggctgcttgtcttcacaactagatgctggtcatttcagtgtctagtgtatttccagactcaaggcagcatcaccacatccctcaaaagcgtctgtgtagcggggcagagacctgcgagccagaatcacaaactcagctctcagatgctcactggcgtctatgagattacattatcctggtgcctctagtcccatctccccagggtctgttcccctaagttcttagggcagcatctgcagctgatgtcctctctggggaggatacataggtccagcaccatggggcactcccactaaaggtgtctgccctatactaacttcaacctctcttgacttcctgaattccatggatgatggtggtttcctacattatttggtcattttttggtactgttttgacctttcaatatgtgttaacttctctatattaaattatttctattaaagtagtatggttttagttttccttagtttacgctgaaatagtaaaagcaataaccaaaaataatggattgtgtttctgtaagacctcaacagctttctgacattagtagttaattttatttttactatttcctcctaaataatatatgttcgaattgtttaaccaaaaattgctcctctttcagattaatcttttttccttcaagaagagtattatatttttcttctttaacatagtttattcttttaattaaatttcttgtgttccttagctatgtttacttttgaatttggcaagttatgtaattttttcataaagaacagaagagacggaacaatcacacattttaaattagtggagaccagattactcagtttcaactctaaatcaaacatattcctggattgtttcccaggtttctttcttctgaaataagtttattaaccctgtcttacacataaaggaacacatataacatgcacataaagtataaagaacaattaaatgaatacccatatattcaaattacaacttaagaaatagaaaataaccaatattttgaaagaggccatgtattcccaaatgacccattaccttaggcccagtgaattctgttgcttattcccctacttacatcctcgaccaaaagaattaattgttgcttatatatttgaattttacaagctcaaatcagagggcttgttatttttccaatgcttttgcttttcttaagattggtaaatgatttacgtactagtaatatagcaaacacagttcagtaactttttttgttcaatataatgttctttgaaaaaagatgttggattttgtttgactgctatctatttgaaatgcactcatggagctttgttcctctgttgtgatatgaataaaatttgttcgtgcccagtggaacctatctgtgaaccaggttgcaaacttagagacttccgccaccataggcttactgagattttgacatagtttttccagagattgcatcccttgacagagacactgggcatgtggtatcatttggagtaactgtaccaagaaaaagctacaggcagacagaagaaatcaaaattgctaaacaaaaggcatttcactgagctaggaagcctgactctcatcctgaggggcaggcatgggaatcttcagataagaagacagacccaactcaatggatgtctttataggaatgctaaagtgaggtttggatgatttcctagtatgtctaagccctaacacattttttctcagttttctcagaaataaaaatcaagacagtatgcaaaaccaagagggctggatggcagactagtgactttgtggagacagcacatttgtcattaacaaataatcatattattaattcaattttacctcatgaatagaaaatgctactgaatatttaccacagagtaccgtaatggcttgtttatacatttaacactttttctatgtctgattaaaacagttgcctctaaaagaaagtgtagacaggctgtttgaaacttcttaagtttgattgtgtaaaataaatcagtttgggtgctggagcaatgaatcagcaattaagtgcacaggctgcttttccaggggacccaggtttgagacccagcacccacatagtagctcacaaccccatgtaactccagctccagaggatctgataccctcctcagccgtccatgggcactgggcatttatgtagtacatagacacgcatgcaggcaaaatattcatacatataaaataaaatacataaatctaagagtgaaataaaataaattaaaacagattttaaaggctatagagaccaaagtaggtacttttataagtactataacttcatctaaaataacctccgatttgacctcaatttagttttctgaatgtatgtctactcacagcaaaaccacccctaaaagagagaaataacttcatgtatcactgaaacatatatatttctggtggctttttattcctcaaaaagtagacttacagtttgattcataagatatctctccttgtacccaaatcatcttctctatgaaaattatcagattttgagaagtaagggatattttcttaactctcagaacttgataccattttgagctaagcagattttacaaacagcagcagtgacagcaacaacatcaacaacaaagagtgacattgtttcatgaacttgtttccttgtaagctccgaggccagtcatgcttgtgttcttaacacagtaccaagcttgcatttctcaaaatgtgctcagatgtgtttcgctgaccacaaaagccactacacagtctgtgtctgggggtggaggggtgggggggggaacaaggtgctctgtggtaaaataaacaaaagaactactgcgaatcactgctgtcaaacgctgtgaattcctttcacaattaacttcactttgcagcttctgtacttatttggtcatgaacccccctgttatggttttgatactgcatggccccccagagatgcatgtattggaggcttggtttccagccagttgtgttctgcagagggcattgccctcagcaatgttttcatgtactgatgagctcatagctgaatgggctactgacagattgaaagtctttgaaggaagtgggttactgggtgcacatttaggagtgtgtatcttgtccccagagtcatcttctgtcttctatccttctggctgccatgaaactaaggagttcttgggaagctcgatcacatacttcccatttctatgacattaaattgatacagcccacagacaaagaggggagttgttaggaaaatgttacagttgctgatcaatggtatagctctttcaatacactatttttcctctagaaaagccacactccttcatggctgtaaacagttactcaacctcttgtggttttgacatattgctaagatgatcctccaatgtggttttctgtagccagtatattgctctagaaaacacacagccaagagacagtgtaggggaagctgtagtcacacctacttaggggctggctacaggtgtacctgaccatgcttgcaagggcgtggtcagggtgatgtagagcgatacttgcacgggattgccttttctctttcggtttcacttcggtacttgctggacagactgctgccatgccggctggctaggttgctctgtaagtaaggcttttccctattaaatacccctatatttctacctgactccgtattggtaatttcccaagacagagtggagagaggcactgacttctcatcattcaagtccatcacctaactaacgttcatgctgctgggctctgagacttcggagactccatatacatttaatatgcagaggttctaaagaaaactcatgtgttcatatatcaagtgtttgcaattatgtgtgtaagtacatatgtgaacatctctttgaaggcatatgtatgtgggaattgtacatctgtgtgcacatatgtacatatttgtttgtgtgtgtgtgtgtgtgtgtgtgtgtgtgtgtgtgtgtgtgtgtgtgtgtgtatcgattgtttgggtatatgtatatctgagtactcacatgcaaatgcctgtgtacttgcatgagtaactacacacttactaataatatcattcctcttattaatcatctgtaaatgatgaaatcctaattttccagaatgaagtgttgatggaagtatgaagtatttcttagcctctccagaaatgcccctggcaccacatcactgtgtatgtacattctaactaaacaaagccatcatttttgaattgtcataaactctataataggaattcttttgtaatgctttaagaattaatttgcttttagccatcttttaaaaatgtattcattggaaagtttgtacatgtatgcaatatatcttgaacatattcaactatcactccctgccttacaaaccttcccagaacccctcatcacatctcccccccccaatttaaatatatggtgccataatatcccacaagaaagaactagttcttacataattgtgacactcagataaggaaaagctatctttcttgtttctaatcaataggcacctacacataaagctggaatggaacatacataactaaggatcagaagtgtagcccttctaatatcagttgctttgttttggggtactgatcacatctcagtaacacttaatgtgccccatgcgaatatgtaagaacttcaagaaaatgttatatttattgaaatccatctgaatatatctgtgaccatatcataactgccataaatctggtgatagatcaaaacccccttgggtaaatgcatctcctatttcaggactggatctgaaatatatttaatttctgtgcatgtgactagctactttttttttcatttgataaaacaatatcaaatgaagatgttatgccatcttattttctatctgcctaaacataatataactcaaaaagaggttgaaatagattctgaacactataacaacaataaatggcacaaaaagatggaaaaggatgttgtttaaaaaagtaaattttggcagactattttcttgcatgtaaatgttactaataaaagaaatgtgaggaatttcgataatctcttatcaaaactacatgatattaggctttgttattcacaatacaacagtaaacacctatgtgtcatttaatctcctatgcacaggaacatgctttgtttttacaagtgctcacaaatcacagaattttgggcaagcatatcaaaggagagcaggcaagaactattaatctttcaacaatgacagggtttgtgtccaaccatgatatggaggatatccaaagattcttggctacaaaataaaaaacaagatgtgaacttgttcccgatgaaatgaactgttactcagatagtaaggagatgattggatagctcaatttccaatgcccaactttttgaagcaatgaaaaataaaaatattggccgatttttcttttgctgtacataaacagatcagctcaacacagcttctgcctgactgacttattttaagaactcttaaaagtctatcatctctcattaagagtatatattaaaaagcgtaagttcaagggcatacattacctttcaggtctttttttagttttctgagatctttctggaagtcttcaaacttcatttgtgaggcctggaacagctcctggggttctgccagggggaagacacactgttccttgccagcatcctaattagcaaacatgattttaaaacaaatcagtgtgagaaataaaaaaacaaaaaaacaaaaaacaaaaaacacgagacaatagaaatggcagggactccaacaaaagaactggataaacactagggaaccaccccacagagaggaataatgggccatcgagatggctcagtgagcaagagtacttgctctgctgtcatctaggacctgagttgaaatctctagttcccatgcaaaaagtcaatcgtggtggcatgagcctgtaacctcagcattgtggcagtggggctagaaataagatgatctgagacctcgctggccagcaatcaacccagctgaaatggcaagctccctgtatatgagaaactgtgtggaggaaattagatggagtgtgcagggaaagagccacaagtcttgctccggcctctgcatctacacgtttgtacaaacacacccacacactcagacgaatgcatcataccatatgcacacacataaaatgcaaacaaaaggaaaatcaaaatagaacagtcttacctcatcaaaatttcttagataataggatacaatgtaggacaagaggcttctgctgttgtcctaggcagaaagatcaaagtaagtaacacatatttaaaaattaagtattattaagaacacagtgtaaagtaaattgcagggagcatacatataaaagtgggaatattctgggtagttttacaatctacactgtcttggtcattgtagttaaagggctggatgacagattttgttttttgttgtttttttttgttgttttttttctccagtgtaagtgccaagaggaagcttcactgtttaagggagaagctcagatgtaaacaggttgctgttttcattcccctcggtcagaaatttaattcgatatttatatatatattacttgatgtatttattttgaagttgcttagtactttttgttcttttaaattacatgcatgtgttttgcctgcctgtatgtgtgtatactacatgtgagccctgtgcctgagggaaccagtagagggcagtggattcccaggaacaggagttacaggtggttctaagcttccctgtgaatgctgggaacagaacttggctcctctaaggaacagcaagaggtcttagcagatggtctctccaggccagcactcagcttttcaaatatcacaatagtgagataataaatattgcttgtcattccatataaatgatcttgccatactacaataataaataattcttggatttgacagaaattcattagcccttagaccagagaaatggaaaagcatttcaggtaagtggagacttctaaattgctagtatgcattacaattcattatattaaccactgagcttgaaaattgatacttatgctactattattaaagataatgtatatctcatttgaaaatgtaaaattattttatatccaatggtctttaaaatatttcaaagactactgttttgcttcctgcatggcacatgtagaagcattaatttttaaataagttttttggcttgctccaattaattaacagataacttaagtttgagaaagcctagagcacaatctaaattctctgaaatgtttccactgttaaaatacaacaggtttgacctaatttggtctatatattttggtgatgaaattggttcagaatgacctccttatattgtgaactgaaacccagcttgatgctactctaaaagtataaactcataaccaatagacagtcttccaaccaattggaaggtgaaagtttctaaataatggccatgtaagagaaatgtcaactgctttgactcaggctttctgtatttcacatctggctataaatataacctgcactcatttgaatgggggcagagcatttggaaccatcattggactatattattaccacaccctagaacttactcttgtgcaaataaatctcattaaacttaactgtccccagagcttctgttactggatctagacatgagtttttccagtttttttttttttgaaacgaataatgccacttagtaattaagtttatgggatactgtaatatggccattaaagatttccgcaccagacaggatttgcttgtggctcaaacgactagaggtctattctttgtcctaaactgtcaatcaatgaaacagcagtacatgagtcagttagtaaaacatcttttaaaagcttgcttatagatataatgagagaccattctggttgatctgaaactatagtctctattctacaaatactatcaggagtaaatatattcacatttgcgtccttgagaaagttccaatgcaaatgatcttgcatagatattatgagaggacaatagggttctaattactaaatattttgctttttgtctcagtatttttaatatgttattttgtaattattggaatgaataaaacataatttaataggaggaagtgatacaaagcaaaattgaaaacacaatccatcttcataagtatttataagcaattttggtttatcagaatatattttgtatcaatttttataagctgaacattatattgacttctttatactcaaattgttatttgcaaaagttgtttcaacaaacatctatttggaaaatagatccttagcacatatgatttgttacatctataaactagaagtttgtttctatgaactgtttatattataaatacaatagcacttgaatatgtatgtctatttgagtacatctgaaagccatgaaaattaactgacgttactgtgcaagagaaaactagctgagactataatcttagcattagggaagccgagacaggattgcctggagtttgatgtcagcctatgctactgagaccaagtctcaaaaacaaccccaaaccccaaactgaactaacaaaaatattattattcagtttcagaaatgcagtgtctggcattgtagacacttagagattaacaatgaatgattggtgcaaacatggagaaccagtaaataatcagggtcttgattgattaaagagaccagaagcagctatctcatgaggacaatgactgcacgctgcatctctgtcatgaggacaatgactgcacgctgcatctctgtcatgaagacaatgactgcacgctgcatctctgtcatgaggacaatgactgcacgctgcatctctgtcatgaggacgatgactgcacgctgcaactctgtcatgaggacgatgactgcacgctgcaactctctcatgaggacaatgactgcacgctgcaactctgtcatgaggacaatgactgcacgctgcatctctctcatgaggacaatgactgcacgctgcatctctgtcatgaggacaatgactgcacgctgcatctctctcatgaggacaatgactgcacgctgcatctctgtcatgaggacaatgactgcacgctgcaactctctcatgaggacaatgactgcatgctgcatctctgtcatgaggacaatgactgcacgctgcaactctctcatgaggacaatgactgcacactgcatctctgtcatgaggacaatgactgcacgctgcatctctgtcatgaggacaatgactgcacgctgcatctctctcatgaggacaatgacggcacgctgcatctctctcatgaggacaatgactgcacgctgcatatctctcatgaggacaatgactgcacgttgcatctctctcatgagaacgatgaccgcacgctgcatctctctcatgagaatgatgactgcacactgcatctctctcatgaagatgaggactgaattctctcaggatgataatttcacttctacaatcatttattcaaacttaaaaatggttatcatattttctcccaccttggtattctttctgtgcagtaattctctttcaggaaagcaagactcttactttctaagtctatcatctgaggctttcatctgtgaatcatctgtaacattacctttccatttccactctaccaatcacatcagtattaattctaagcaacagaaaaacctccacagaaaagtggggttaaaaatagctctatcagccaggtggtggcaatgtgcatgtttaaccccagcactttgaaggcagaggcagggggatctcatcagtttaaggccagcctgctctgcacagctagttccaggacagtcagaactacacagataagccctattgaaaacaaaacaacaacaaaaaattaaacaaacaatcctcctacaaaaaaaaaactagtctgcaaccagacttagacattgtcatacatgtagcagaaagaacagtgtgcagtgtatagaaaagtgggatcttcttttatatttcacttatgagttactttcactcatgtttggtttgttttccatgctgcctaaggaagaaaagacaattggcagaggctctaattcactgaaaatgattagtcctttgtttcaaaacaaacttcacccccccaccccactgccaaaaaaacctagcaggcctgatacaagaagaaatacctagttttattttaaaacattaaattacatactcattaaacacagtactcaaaattccatcaggaaaattatcactcctttaaactacagatacccagatcatctacttttacctggctcagaaaaaaatggaacttttgccagaaatagaggctcacacctgtagaaccaacaactttggagaagagacctaaaagaatccagagtttatggtcaccctcacttatctagcaagtctgaggctattctgggttgtataaaacactacttcaaaggttacatacatatgttcatgtgtgtgtgctagtgtgtgagaaatttttgatctcagatcagaaagggatacttattatgtcttgtttaaagccaaacacatttaaaaaacaaaacatcctccatttggtgcaaacattaacacaaaatacttacactgcttttgacatcctttagcttcggcagaatgtctagtccaaagccatctgcctgacctcgagtcttgtttccagcattcatgtagttcccaaaggctagaaccaagcccaggacttgcatgacccctggtccattttttaatgtctataagacaggatggcaaagatttttctcttacacactgttttatttgaatcatctaaaatcaatatcaaaataatcatattatgctgagagctttgagtgacagccaaactacccccccacacacattattctgtatactttaaaaacagcgagcgcctcaaagttacctttaccatagtatgtcaccaaacaacatgtgtacaattgtagaagccaagagagccaatctggtcccccagacaatgagaatttctagaaaataatatcacctctattatccttaactgtctcaatgttaggaacaatatggatttctggcataagctgtagaataccaagaagcagttataaagactgaattcccaatgggggtttgccacccacaagttcaagatctccactcccagaagcctgcctgtcttcaggtgtttttgtttttgtttttgtttttgtttttgttttttgcaactttctctgaaagtgtccatagtagtatctttctgttctgggagatcacttaaccccaatcagaacaaacgcttctgctgatttttgataaactgttttaaatgctaatattggtccttccagtaaaatatgtatttgttgcattcagaagaatattttatttaccttccacagagtcaaaagacttattccaaaagtcatttgggtacaataaatattaacactttactcaggggccatttcaaacaaacaaccgaaagagaaataaagggcatgcctccaaatcactcccatttggaagtccgataggtgagagaatgtggaaaaatggggatttggttttggtgaaagccttgggatctgagatgctaggagatgaatagaaaagagccaggatctcagtgtgatcccactgccctgtgaatatgactaaacacatacttcttcttgaagcctagtccccaaatagtccctcatgtgggattgatataccttgaatttacaagtacttcaagtaaacaaaaatcatagaaataagtaagaacatgactgaacacaattatataccaaaatttgtatgcagttctctggcccagaacccacctcacacaacttctggagcaattccagttttcgtcggattgaacaaatgctctctgaaaacgttgactgaaagaggatgcagaagactcgctctgaaaagttggggattagtgacagctcatacaggaacctagacagacaaaggcaagcaggcagaaaaagtataagccacccaaacagtgatgcttcctttataacaagcatgcactcaggtcccatcactttccactgtgagaagcccactggcagctttgattgccctcccaggtccctagacacacttactgttcaggtttgtcaagagatttggcattttccttgtctttggaagatcgactgtgcttttcaattttttccagttcatctgactgtgctctctggaaaaacaaaagccaagtgtcttttttttttttaatctcttcaaggtcttcctttagataatgaagattgcaatacagcagaattctctctattttaatttcgtagcatctgtttatgttaaaacttgacttaatatgtgaggcattttaaagtgtaaatatgcataataaaatccagatcatgcttaaatccccacataattctattggctattagtgatctgaaagatacctattaattaaagcataaaataatatttttcattaacttgtctatttatattactttctagaaagccataattttgttttaacataatagttctcattcagatttcaaacaagttaaatttggaagtaatttgatgctaagtgtccttaaaaatatctaactattgcaatgattgcgtattgcttttgttgtacttggagaaaagaaaagtggaattaagctattaaaacatggaacaaaaataaaagattttcatgcttttgttaaacatgattttttgatacaaaaatagctccagctatatttgcttttgtctcctcctgttcctcataattgtaagctacaaattttgtcattttgtttttcttcatgggagagaatcatcttcatttttaatacaagtgaagggtttacagattccatgaagcacacacttatttctccttagagaacagtaatatgttttatttgtactcagacataattttacacatcacaaagatgtgtccaacgaacccagactgcatcatctacatgcatcccggagtcatatgtatggccatgtgctagttagaaaggcagtcctcaaaacttaaaatccttccaatactgtagtttgttagaaaggatatagaagactgagtaaagatccccagagaaggtacaggcagcatccatgacagtgaactgttctatgttaattaactgttttttcagaaaccagtgttttcagttgacagatgttaactatctaacctcaaaaagaagcatcttgagctgatgacaggtgagccaaagagggaagtaaacagagaatttgacactttttctttggggtgtgatgtatcaaaagcatatgacaagagaaataaattctgtcatagacttatgtagaagttaaactccttcaggaatttcaggttgtatgtaacttccacacttctccaacttataaggaacttataaaagatatctagagggaaaagaaacaatgatatgaagctagagagatggctcagtggctaagagtgggaattgctcttgcagagtaccaaagtttgatgcctagtacccatactaggcagtttataactgactgtaactctaactctctccatgacgtaaggacctcctactaggccctaccttttaaaggttcaattactgcccacacatttggctgtttgtaagagacattcaaactctatccaaactgtagcaccagtgtgttaggaaacaaaaaaaaaaaaaaaaaaggttttcaaaatatattgttgagtctctggtgctgaacttcaccagtcaaaagcatcaataccatcagtcactcacacccgggaaaaatttgcctgacacagatacaccactgtaaggttcattggagctttctggtcttcagaattggagagctcttctgtactattcttgcgagagagctcttagctacaagaatcacaaacctaaaagacttgcaatcttttggccagccaattgtgtggttcctgaatgggaactttgtggattacactgtattaacacaatatcagaagactggacatatttcctcattttgcaatgtcaaaaaccatcttagtattattatgaaattggacccagagcttttccctgggatatgcttcatgaacttgggttagtacactagctttcaccaaagcatcatcttgggaagcatgccctgatactcttgttctcattttaatgaattttccctcaagatgacaacaaatgagagcgtctgtttactttgtttcattattgtgtttaccttagtatctaggtgatgacgatgatagttgtacacacacacacacacacacacacacacacacacacacacacacacacacacacacacacacctttgtagactgaaatttaaactttctgagaaaagcattctgtcttatgtaactttacatcccactaactaatatggtttgtggtatatatttatcaataggtaacttgaaaaaaagtaggaaatttaggcaaaaaaagagtaggaatttagaaaaaaagagtaggaatttaggcaagaatttaatgggggaaaaataaagaaccaataaatggcataaggtagctttctgatttggagagtaacttagagtttctattcctatgacaaaacactatgacccaaaagcaagttagggagtaaagagatgatttggtttacacttccatatcacagttcatcatcaaaggaagccaggacaggaactcaaacagagcaggaaactggaggcaggtgctgatacagagctcatggagggctgctgtttactggctcgctcagcctgctttcttacagaacctggttcaagggatggcaccacccacagtgggcttggcccttccccaccagtcacaaattaagaaagtgctgtataagctgacccagaacctaatcttatggaggcattttctcaaagcagatttcctcctcatagatggctttatcttgtgtccagttgacataaatctgaccagcacagggagagagaaggcaggaaacacaaggatgagaaaaaaatactgaaggcataattggcaaataatgacaaatatttttttcatcctagtagtactgtgaaggcccttacgaggtcaaatctctaaaatagatacttgtgcatgcctgaaatggaatcagttctgccaagtgtcagcacacaaataagtaggtacaaaaagaggcccatacccacccaacgtatatgtgaattaagtcatctataccctcacctagtgcaactccattgagagctttttcacataacacatagaaattagtgtgaaagtacaagaatgaggtctaaaatgtactagatttgttcgacaacattattctaataagccaggttgtgctctttataactatgtctaattgttcctggcccatcatcctggatttcttcttggaaaacatgaaggatcaaataaatgtctggtgtttttatacctactgagttctcaaattcttccccttatcttcaatcatacaaattatctcaaagtatgactgaaatctgtaccacaacccaaactggatggtttgggttttgttggcacttcagtgctcttctttctgtggcccaccagtttgtggtaaccacagaagctgggttttggaagaaaaagaggaatttagaggatttgtttatctaaaggtatattatttactagcatttcactagacaatggaaacacacacacaattttcaaagtgttcaaggtatgacaaatagtgctccagaggacacagatttaaactcctgagattccttggagtatatatgcaatattgattttgaaaactcatgatgctaaatataaatagtcttaacagttatgttggttcagactatttaatgtccttattgtgttaaatacagcacaaaataaatatgcatgtgagagaagagagaatgagtacccagtatcaattagtatctcaaagatataagtagtctatgggatatacagtagaaatacaaggtctccagattcttttgttcatattctttgcaatttcatgaggtttctatactaaatttctgcccctctcctcaaaaaccaacatctgttacttctaaatattctggataatcttgtacttatttatacctttctcatgaatttaataccacacattctctgagtttctcaatctcttatgccatcctcctcctttattaattattactaacaatgacatgacgcagatctttagtctgtatttccattctaaccaatatttttgctccatggaggcaacacctttaactatttttcatcaacatctctaaaatcaaactcatattttcttgtccctaggccttcaatgatgcttattccaaaacctgaaacaatggtcctacccagagatctggaatatcatctagaagcctctgaactttacttctatatccaataaatcaccgagtctcacatgcacctacctctattgccatcatcctggtcctaacgaccatatctctgcttcaaaatcctgccttcttagttctcctgcaacaacctctggctctctcacactcaaaggtgattttttgtttggctgtcaatgattcatataagaataatacatgtcctattcaaaagtctttgatggttatgcatcattcctacagagtgtacacctcaacattcttacaaagccaatactgtcatccccttacttacctcttgctacctacattccattctttttttttctatattccattcctccttattcctaaaatagatcaggttcttattccatcagtgctgttccctccacttctcactctccatatctgtacatgcttgcttcagcttcaaagctttataattaggggaggcctttctgaatccccaccatagagtgaccccccactaaataattccctccttgtagaaatgcacttatccccaggagcacatatcacaactttaaaagaacattcaagatctggggtctaccccaggaaattagatctatggtataaaaataattgattgttggtcatcaatgtattgatagctcagcacatatgccaacacaaagatggtgtttagtaaatatctgaggaaagattaaattgtattgctctcaagtttcctaatttatttttaatgtcttattctgctttcaatttaaccattcttttctggaatagaaaaatattaattatcaggagttgaaagagtagggaacagtagcagagattttaggctatgcagtaatggatatcaacacatctatagcaataatgatgggagacaataatctgattttatactggatgatgtctggaggaagtataccagtctcagggaaatgagatattctatagaaacaactcttcaaactaattattttctctactccagtatcaacaacctttctcttcttgtaattctcctcatgtgcccccaccttttaactaaccctttcctctaacccatgtcttccagtgcagcactaaaactttcctctttctgatctaaacctcacacttactttccccacagtaacccctcacccagtcttcccccaccacacttttcttcctcttgtcttccagcacagtggggaagacagcccatagtctctggacatacaggtctcctaggacattacaacctggctctgtgattcagaaaaatcctcagaacccagaagaaccaagtgcaaacacttctgtcatcaccaggtgcattcaaaatgggaggctgcatggtgtttggggaaagtgagggaagccatagatactatgtatctatgtataccatactgagaatcaccgaataattggtgaaaaagtcataccaatcttttgtaataagtttacataactaacaaaatactcaagaaatcaaatttctaatgaagtcaaaagtccaaaaattataggatgcaatttgtattttaacaaaataagaaatgcagttaaaaaaaaaactatagccatttttgtgtatctaataggtcattgggggggtgatagcttcccattctctttagaactataggtaaatgttcaggggtgctttgacagtctccaacgtgtcattgtcctgatccagaaggccccagccagctgcacatgggttgcatgcttaaagagagagctttcctttcatctcctgagagacaattctgagtttgatttgtaaggatttcactgtaactaaatctgctgctctgctaatgatcacatggtctagaccagtacttatgtagacatccatggcaaactcaactacaacacaggaaggctttcactgaacaatgttttcagcaactccagagatacaacgtgcaaagcccatattaactagaaagccagtgtgtctcagtctacataatggtctggcaacaccaagacaggtgcaaatcagccatagatctcctcagcacttcacaaataaggctcttcttaatgggtataatcaactccctttagacatgagcatgactgggcccagacaagagcagctataacacaagatttcagataaattggggaggttatgagacattcagacaattccaggaaatacaccaagtacttgctgtttggatgggtcccaggtcttttcaaatttatgtgaacatatacatttaaaaagcttttaaaaaaaacaataaagagaccagaggcaatgtattatttcatcatagagtatacagaagattttcacttagcaagaatcaattcaagaatgatttgatgctatcttttcttgcaagaggaactagagaagcaatgccaggccttttgcagccatgtgagacaatacttatctggagtttgaaacacatagtttggtttagaataaacttcatttggctgtaaaagcattcagttgcatctctgtatttctcctttgcttgtgtctctgcttcaagagattacacattgcttatcatcaatttggccgtagttcattggaggagcgtctcctattgagtgctgcccacttacatatgtctctttgcccacatgggtgattcagaaaaggcacccatcttgacaaagggtcattctcactaccttcatatacacattcaggagtaacataaaagcactaagctgaaagttatagtacttggtgcagactcaaccaggccattcgaaatatgagatttgatgttacctctcattttatgaatatttaaaatatatatgcaaatgatgttattgataaaaataccctttgcatgtttaaatagctgttttgctctcagcactttgaaaggaaaatacacacatacattattgaagatccacttaaattatcctcttgtacattgcatattcaagagaatgaatgtggtgagcatatttctgtttgctgacttacatctcttttaattgttcttgtcttccagttattatttgtgtttggggtgagtagaagtcaaagaacaacttgcaggagtcagttctatctttctaccacatgggttccagggatgaaactcaggttgtcaagcttggtggcaggaagccttatctactgagccctcttgccagcccacacttcttctaaccttaaaatctttcaggatactttcttggttgtgatgattaatcttggttgtcaatttgacagagtttagaatcactctggaaaacaacctctatggctgtctattaggaagaagtctcctgagtgtttaactgagaggggaagactaatcctgaaagtgagtggtggaattcattgggctggagttgaggactcaaaaaggagaaagtgagtggactaccagcatgcagcttggcttcctgactttggatataatgtgactgcctgcctcccagtcttcccaaccttgatggactgtgccttcaaacccaaataaactccttaagcaatttgtgtcaggtattttatcaaaacgatagaaaagtagccactaaagaatcctacagatctggattctcacattactgcttttagatcttgttcttggaatacacaaaaccatttaatatctttgaaatttcaagggctgaggtgaattcgaaagtggcaataatgtactacagaaactgaaggttacatatccaatggatagagtacttggggggaacctcccaattttgaacatttaactctatgtgtaaacatgacagaacacaaaataattcagaaacaaatatacaatagatgccatctggaaccactcaacttcctaagtaggtacagtgaaggaaaacatactaggagttctacatctgattaagagagctaattatttactcctttaataaatttattgcccaattaaatttcagctgttgtaatcacgagcaataagcaaggaaagttgatgaccgtatcaagcatcagacgtcaaagccatccactgttctttctgttcatgcgtaatataatttcaactcaggatctagttcctgtgataaacaaggttcatagcaggtatttaaaataaccatcagatgttataatccagagaaaaaacattttcctagcctttgtagagacctggattcctcggccagcatattctgctaccattacaaaaaagaaagaaaaagaatgaaaggaaggaagaaagaaagaaagaaaagaaagaaaggaagaaagaaagaaagaaaggaactaaaacaaaacaaaaccctctctttacataactatactcaagccaaacctggaagttttctacataaaccacaatgttcctagtcttaagtacattcatttaacatcagcagaataaaagaatgtaagggtggtctagcagacatttatggcaccaggttgaaaaaatttattgtatctgctagccaaccgtaccatttcactaatgcttgcctgtcgtcatggaaaattactgggaaatgtttagtgtgtgtgtcagagtctgtcctcctcagagtgctgaatggttgagtgtatatgtgcgagagacactttctgcatcctactgagctaaaaggattgttaatgctgtcaaagcaagaagcaagaagacaatcacggagaaatagaacttatatgaaaacaatggctcgtagagagaccagaatgtataaacaattcaccagcacacacgaagatgtaaaattcatgttcacagtgaggggggaatgtcatgaagggaccaaaggactgtgtaataaaaagagacacaaacaagtattccatgttattgaacaaggtttacatttaaaactcaaacacgagaagaaatagaagcaaggatcaaagctaggattaaggcagcactaaaggacttcggacatatttattgaagactacatctctgtctactctaaggaatgaagatgatcacagtgatgactctttttttcttcttctcccatttttcctctctttaagtagtggaaacatcaaatatctctcaatcttggtcagtctggaccaaaaagaggtcagcagctagactattttttttttattttagaagcattcttatctcatgtcaatcccccattccctccccctcccatcctcccatgctccccactgaccccctccaacctacccccacccactctacagggatagtgaggccctctacagggaccattaaagtcagtcacatcatttggggcagggcccaggccctccttcctgtacctgggatgcaatagtaatcctccatcgggaatgggctcccaaagtccatttgtgctctagggataaacactggctccactgttagaggtcccatagacttccctggcctcggcccaatgctagttccctcgctttataactagggtgtccatgctctcactaggtaaagtcaactgtttctgtgggtttctccaacagtcttggctcctttgctcatccctctccacaactggatttcaggtgtatggctcagtgtttaagcagctagactattatttttcaggagaatgtgacttaagcccaggcagagtacagacattttcccctcatttctagtcaagtgatgtctgggctcccggttgcagttggatgtttcccttcctccaaccaccatagcctttatgatctaaatcctcctcttctacaggagggggtggtacttaaagtctgcttcaatcaaatctaagcatttacattagtaaatgaatcatgtaacattagggattgatttccagtttgtactacctgtagatttctgtttgcatttgcatagattgtactgtaggtatatttctttaaagattaggtgagggggaattctaagaattgttgcaaaaacaagctctgtactggatctgtagaattgaaaattggcacctggatgtaaatggtatacacccaggatcaccacaaacctcacatagtggtgccttcagcaaagacaaagaaagcaataacactcacctcaaaagccaatgtgcaatcaggtaaccaactttaagtgattaatttctctagggtctttttaattttggttttacttttcaagacagggtttctttgtgtgtagtcttggctatcctggaactcactctgtaggccaggctggcctcaaacacagaggttgggtgagtagatatggtgggggaaaggggcaggggcaaaaagtactttttaaatcggccttcttgacatacaaggaagatgctgatcttcaaatgtaataaggttagcactggtgaaaaatatgagaaggcaagtatgatggtacaggcctaggcagaggcaggcagattcctggaagtttgagaccagcctgatctatatagcaagctctagaacagcaagggatacaaaggagttcctgtctcagaaaacaaaacaaagaaaagaaagagaaggatgaggcaagaatctaggctaacagattctgcaccatgctcttagagtctgctttctgggacactgacaatgaagccagagacagctttctaaagtgcaaagcaaccctcaacttctaggtaaggtggtggcttggaaatctgacctgaaattctggaaaagaaaacagagatacctctgcaatagactgtggctggaaatgaagtcattaagacagatagaagcctcagcaggaaagtgggcaacaaaactgagaatctgagcccttgcaagctccaatgaatcagcacaggaggctggaggaaagtgctgttcctcacatacactcaacagcactgggaccctcaaggacagaccagggtggaatgcaggagtcctaggaattaaattcccctctcttgtaaacaggaatcatgcaaaacatagaggttatagagaccaatgaatcccagcaggccctttctcacttgggtcctgctagagccaaagtgatctgagaaggtgactttcaactcagagcagatgtgtcaagaattcactccataagttaatgttgtcattaacattcttttgcagtaggcagtagtcagggtagagacttgtaactggccaaagtactgggagtatgagattatttatatgttcagtcctaaatggaacatttatatcaatccctccctgcccaaagctcaggaaatgtcttggaagaaggagtggaaagagccagagagtggcgaagtgtgctatgaaatgcgatcctctgggacgtgacatggctattgcactcatgaacccacagaagccaaggttacctgcagaaaacctccaggagattgagccacttaacagtccagcatgggtgggtgcaactcatgaggccccgcccctagccagggggatattggcaattcatggctgccaagggctgttagaatcatttttcttcaggggtgtaagtaggttgcttgtactttgatggatgatggactcagagaatcacacacacacacacacacacacacacacacacacacagagagagagaaagagagagagagagagagagagggagagggagggagggagggaggagggaggagggaggggcaaaagtatacatgaaagtagcgaagtatgtggtgtgctggggaatggaagggtagatctggcttggataagattaaatatatatatatatatatatatatatatatatatatatatatctgatacttcaaataataaaattaaatattgaaaagctctcaaattagtcttgtagatcacgtgattggtgtcacactattattcaaattgtgattacagaaagcttatttgtacatacagtgtatgtgtgtacatatacacatgtgtaaatgcatgtggaggcaaaaggttgacattggacatcttccttgatagctttccactttatgtttggagacagagtttctcactgagcctctagcttgctaatcttgctagactggctggctggctggtgagttccagggatcatcctgtttctgcctccacaaagctggggttatggccatgctctgctaagatatgggtgctacagatgcaaactcaagtcctaaagcttctgagggtagtacttactgactgggccacctcctgagctccaaagcctggtattcaaaagcaaataatatccaaaggactccattcaggatggtatgttaaacacaaaccatgaaggctcacgggcctccacttggcaaatggtttttttgcacttactgcatgtcaatgacagataatactaagggaggaaaaaaaatgtcatgaggttggagaagctgaggaggatgatcaagagactacgtgcacagtacacaggctggacaagtgagtcacagcaggcagtgaacagaaaggaggaataccacaatgtaagcccataagacatctggcactaggaaactgttgctggaaaagcaggatgggaggagaacaaaagatccattggcctttcatcagaaggacaatgtcagaaagagctctgctcactgctgctgtagtatgagagtttaagccatctgggggaactgagtgcatccaggtgttggagggtagagagctgatagttggtaaaatagccagaactatatagaactaaaaatgaacatactaacacagccaaaactcaaaccagccagcttcaccaccaggaaccttgaaagagacgacgtggcacacatatctgcaaagaggaattaacaacagactgccccagtgaacagtgactgtgaaggatgcttagcactctcagtaaaggcacctttgggaagccaaccatctaactccaacctaacagtgagcgaaggggaaaagcaggtaggagcaaccaataccattctccagttactgctgcagcaatgttaatctgcttaactcattttctaggaattcatgcaacacagttggttattcaaaaataagcagtgatttttatgatctggaggggggttgtttttgatttttctaagcctatggaatcaatctataagtgattcaaagccaacggctttttgtttttaattctgaaagtcaccttcaacatatttgcagacagaagtgaacgtgctttacaaggatgccatgaaccaatccaacggaacagtgaaatacaagagctgaagagcgttaaaatagttaccgtgtgaaaggcaatacatgcttgtttgaagaacctgatggctaaatgttgcttaaaacatgagtcaattaaattcttctaggaagctcgaggaacacagatggttaatccaattcattttcactaatgcaacacgggacacgcttttcaggatgttgtatcctgtgacacactacagccttcttccagattaaagtttgctggtatgtcaagtaccaccctaagtgaaggttactaaaactataaagtatgcctgtgaaattcaatcctgagaattgtaaatttagacttctcattctttctgccctacctgccttccccctcctttaaactggattagagctggttaattaaacaggggtgtcgggtgtttttcccttcctatcttaactcacattttccttcgtttgaacttctaataggattggcttccaaggtttagcttcattttaatattctctttacaaacaacttaggattcttttgttcatttttcgacatgaaataaaatgaagtttaaaaaaaccaactcctagttgtgcatgggttatgtcagatgcatctagatgtaatgttactcgtccaatacactaaagaaaagtgaggaattcatctcaataactgtccccctctccaccccagagtccctctccactcaccccataaactcaccacatcataataggagtatattttaagaatcagaagcaaaatatacatttacctaactatacactgcagagacttgactctatgaacttaatgatagtcaataaccctaaataaactataaagacttttgtttttaaaacctcattacggtggactgcatacagtaactatgtggttttcatgaagtcttaattcctcaataaacaggaatcgggccctcaggattgtggtttctgaaattagggtgtgtttagatttggagactgcccaaaattcattcacatctagaagagaaagctcactgccaagcaaatgcaatcagaggggaggggggaggagattacattctaaataaggtttgtataacaaatacttccatctgtttcagagagatcaaatgcaactactttaaaacagtccattggcatttaagcatctggcaaaaagaaagtgtatttatgagaaggcattcgaattaactgtatattttgtccccaagggtaaatagtggaatgccatgaaagattacctcttgtatatttgtaaaaaatagaattaaaacatattttctagataggtttgcatgccccttcaaatgttcttatttgtaaggcaaaattaagcctattcagagatcatatttaaaaaaaaaagagagagacctactcagatagttttatttaaattaattattataaataagtcaacacagtaaagtttaaaagatttccaaagagaagctacaccaagtctaagcatatgcaatggtgatgtcctccaaacacccttcatagaaataagatgtcatatggaatcacaaataacatatgacctgcatgccaggcaagactatatttatatatacctgggtcttttctgttatctatgccccttactgcttcttgcctctccatttactttctggaaattaatccaagataaaagagtaggggagcactcggcattgccttctttacaaggaattaggtttagccaacaggaggcactagaggaaatacatccagaaaaaagtttgtcttcccatccaaagcaaccctgttggccttttctctctcctgttgcagaaccaagcaacagcagaggtatcagagaacagctgactgcacccagacactaccccagtagcacatattgtacagggcctgctgggagacttgcaaccatggctctctgatcatttgcactcatactaaccttgcaatggcccacctggcccctgaggtttgtttcctggactttgtaaatactctaaactccaggcatcttaacaactacagcaatgctgactgttgcaagaatgccatgagtctacctgtgtactacacaaaagcttgtttcctgactacttattagtagtgatccagacaaactaatgggctacaaccacaccttccccagtgagatctgctcactggccttgaatgaccctctttaaaatttgtacttccctaggtgtgcttgctcagccccaagttatggtgagagctgtcactttaattctgtattctcctatcacatgaaaattattcattataataaaacttcctgtttgtgttattccctggaagtgtttcttgtttgaactgtactggtggtttggaaatcaattgaagaagctatcccaacattaaccactggcttttacatactaatgaacacagggacacacacacacacacacacacacacacacacacacacacacacacacacacacattgatgacattatgatgctaaaactcatcataatatgcatatccatggtgcatatttatcatacatatttctgcaagtctggatttattgcaattgtcctattgcagcacggttcaaatggtatacaactgtccttactagattagttaactatttgaaggattcagctaaagatgtcctccacttgaagactcatttagttagatggatggatgagtagtttcacttacaagaaaaacggaatagtgtgcttagtgtgcatgtacagctgtatgcttgttcacatatgcttgggcatatgtgtccatgcaaatgtgtataggcatgcatgtatgcaaattcacatgcagatgggtgatcatgcatgagaagtctgaaagtcaatggtaggagtcttctatcatctgtttccaccctattctttgagtcagagtctgtcaactgaagggaagttctctgatacgactaatggagctagccagcttgttctttgctctggcaatgaacttctctgccttatgaacactgaaattgcaagcggttgccatgcccaccctgcctttacacaggttctgctcctcatatatatacagcaagtacatttatccactcagccatttcctcagcctccatgttttgttttttatctttgttcctcaatgatgcagttttcaatacaggctacaaaaacaatggtgtttcactgagtatgcagctgaaaataatcctagataacaggtattaaaaaacaaatcagattcctttttttttttttttttttttttttttttggtttttcgagacagggtttctctgtggctttggaggctgtcctcttgtggaccaggctggtctcgaactcacagagatccacctgcctctgcctcccaagtgctgggattaaaggcgtgtgacaccaccgcctggccagatgatcagtactctttctggtgtatataatgtttttcttttcagattccttttttctgaaaagaaaaacattatttacaccaaaaagaatactgatttcattaattatttgttcagttaataatgaaacacatgcataagaattgcctaaaatacaatcatccaatatcccaaaagcacaggaaaatgagaaatactcttggggaaaatacaaccagcagatgccaaccacaagatggcatacaggtgctcaaataatatataaggaatttgagacactaattagaagtgcacttcatgatttaaagaaggacgtgttaaaatgtatttaaattaaatatttagttttaaatctcaacattttaagggatggttctggaaatgtagtataaatcaccagaaaacggatttctcacctaaacagaattagtaatagcagaatcttattgattcatccacttaggaattctggaatctgcttcaagtttgcctcttacaggagaggaactgggctgtaagttgggtgaatctgagtcacccaacttagctcttatcctatgagcagttacccatctcccaccccactcctatggcacccaactacatacatgttcctagatcaaactgacatagcttataggaactggtgcttaaaaaagaaagggcgggaaggaggaaagagggaaggagggagggaaagtaaagaaagaaaaggaaggaaggaaggcaggcaggaaggatagagggagggaaggagggagagaatgaagtaaggggctctgtgctccaaacatcagtgctctgtggtttgatcacagcatcttattattgatcatacaggtgcacagaaaggggaagccatcattgcaccctcggttgtagaatcacctccctgactggctgaaataaattccaagtgttgtaaaaggacacagtaagtttccataccctctttatcttcttattttgggggagctagcttgtaaaagcaagtgcagagacggggttagagttagaaagtgatcacacattcccagaataagactgtgagctcagaaataagcttaaattcataccacaatctgattattagcccaaggacaatgcatcctagttgaagtaaacaatagcaacaacagagaagtgaatcccagggtgtaactctactaccacattatcagattataaataaaaataatcacaatttttcaagaaacaggaaacttgggctattcaaagacagatgcttttagatagtgtgcatgaagagaattttaaacatctcaaaaaaagatatggaaaatatgcagaaaaacaatgggcaaaaaaaatgacagcatcaataaagagagagaaaatctggaaaaggaatgaaaaggaaattctggtgctgaaaggtataataacagagaggaatgttccactagggttattcaaagacagatagatttgagtaggcaggagaaagagccacaaagttgggcaacagagggtaacaagtctgagaaacagaaaaaacaattaagaaaactaaagggaccctaatgaaacagcggaacacaaacactcagtgcttgaacccaggaagaaaggagcagatagaggaactgaaaaactaatggctgaagctttgtcaaatttgatgaacacttaaaatataaacatccaagaagctcaactccacttaagattagaatagtataaatgacatctgcaaagagacaactactttgggctgaccaccgactctctcctcgcatgtaaacaatctaggtaccatgcctgtctgacatccccttactttatcacaggagagagagctacaagggacaggatgatgctgggatgtcttcagggacacactggacattgatccagatctccagataacttgggaatatcattttaagcaatgggcagactttttccctttttccctttttccccccttttaaagtgacatcctcatgcctaacaaacttctttaaaaatccaatgtcatgtttactcttttctctgccaataggcctgatcagtattctgaaaactcaatacaagcctacttttcctcaaccccttttctcatatatataatatatattctcatatattccaatatgcatacacaaatttttaagttaccacatgtatttgttatttacttgcagtagggacaaaaggaatgaaatgtttactttggcttagcgtatacttcgtcatggtggggaagtcatagcagtagaagcttgaagtggctcatcacattgtgtccacagtcagggagcagagggtgatgaatgttggtgctcagctcattttctcctttatatgacattcatgatctcaggccatggagtggcacttctcatatttagggtgggtcatcccacctcaggcaatccaatagagaaactcccccaaatacacaccagaagttcttgccatattaatcctaaatccaagaaagttgattatcaagattacccaagctttcatgtgactgggtatcttgacaagttgaaagaaaagaaacctacaccaagacacgtcatagtagcctgaattctaattggtcttaataataaaaacctgtagtcagataaagcaattaatgctgaaagaacagagaagcagaacagccagcactagttcctacctcaactgaatcagaccaaactgggtgaccctgtctctaggaatccccaaactgaatgttctgagctcccgtcttctcccgccttatattcctctttccacccaatcacatctctcctgtcttcgcctccctagtgctgcaatgaaaggcacgtgacccaccccccaagcactgtgattaaaggtgagatacttttaatctgtttctctttcagactgaatcaaccttgtgtagcccagggtacccttgaaatcaacagagatctgcctgcctctgcctcccaagtgctgggattaaaggtgtgcgccaccactgcctggcctctatggctaactaggccttcacactctgatcttcagacaagctttatttgttaaagcacaaacaaaatatcaccacacattttaatcatacttttccatggagatcctatccagtgggaaagtgaaacaccacgcaacacacaaggacccttggtgagattatcagcagatttttacgtcatgcaactgagaggttaggaagcagtgagccaaaccatttaaaagatcagtatcactaaatcatcagtcaataatcttatacacagcaaaactgtccacctatggtgaaaaagaagttaaggtattgtcagataaaagctgtggtcactgagtagtgggaaactcccctttaaaattgttcagttcaagggaaatgctacaggaggagacagacgagtagcagacatcaaaactataaagaaataaagacattacaagcatgagcacctcagccatgtcaactcccataaccatctcttttccaatgaatagggcaaagcaaattctcttggtgaccaggaaacatcaggtccccaaagatcatatgaaggggaaagcacagctatacagtacacaaaagcctcagctactttccaggaatggcaaggaaaatattttcctctttctacttgcttttctggttttctcaagtcttagaaaaaataacaagtacaaacatattgcttcatatggaaaatattattccacattagttgcataatgataatatgatcttggttttatgttcactgtatttatatttagattcacatacagcaaagggaagcatgaaggggggtagcttttctcatgtgaaacaaattgtgctaaagtttaatggtttgaaactttattttaaaattcccataatttttctggtctaggtcaatttgtattggagttacattcagatggcagacacatatgagtagatccatgtgttgaacctataaatgtgctaggtggttggcagtctgctgaaggttagaattcctggatttcatgttcagtgcaatcttcaattctattagattgtgccaaattgttttcatggtgtgtgtgtgtgtgtgtgtgtgtgtgtgtgtgtgtgtgtgtgtattaatttcttttgactttacagttgtttttctcagttttgaaaagccatcacacttatgattggaggcttaagaaaatttatctcattgatgtcctattttattttgcctgttcattattaagaatataagctttttcaaatgtttactagatagacacatttatttctctttgaactgtctctatattatctaccaaattctctttggagatgtctcaaaaatgtaaacatttttataagttccagctcctaacattttttttttctttccctattatgaagacaagggtctcactatgaaccattagaaatttctatgtagactattaagctatcttttaaaattgtgtaggccattgggttatcttttcttaatttttaaaatttcaattaaaaacaatcttattttacataccaatcccacttccctctccccgaagtcctccctcttcccccaccgtctcccatgccccatccactcctcagagaggatgaggccttgcatgggggatcatcaaagtctgtcacatttggggcaggatgaaggccctcccccaagccccaccctgtatctaggctgatagagtgtccctccatagggaatgggctccaaaaagcccatcagtgcactagggataaatactggttccactgcccttggccccatagactggccaagccacccaactgacacccacattcagagggcctagttcagtcttatgaaggtttcccagctgtcagtctagagtcggggagctcccacacgctcaggtcaactgtttctgtgggtttccccagcatggtctttgtccctttgcttgtctccctctctacaactggactccaggagttcatctcagtgctgagccgtgaatctctgcttttacttacatctaggggtacgattctcgcttagggttatcttttaaaagtgtctatgtgtcaatttttttggcttaaacccaaattaccaaatttgaagtaaaactgatcaaatttgaaaagtatatgattttaaaaactttaacttttgagaaaagtaaaaattctagaatataaactgataaattagaaatcagatcatcttatggacaggttgagccatcccaccacccctgttgtatatatgtttctaatcttttaccactctaagatttcttcccatggctttgcttttagtttggtttcctttatcttgtggcttctatttggtttggacttggttggaggtttctgaccctcctctacctggatattgatttctttgctcagttcagcagttatttcaggaaatatgcatttcaaagtctagtagtgtcttagttagggtttctattgttgtgaaaagatgagatgaccacagcaactcttataaaggaaaatattcagttggattggttacattttcagaagtttagtctgttatcatcatgatgggacagggtggcatacaggcagacatagtattagagaaggaactgagacttctacaccttgatccataggcaacaggaagtgaaatgtgacactgggcatatcttgagcataggaaatctcgaagcccacatcctacatcctacagtgacacacttcctccaacaaggccacatatcttaatagtgccactcgctatgggggccattttctttcgaaccactgcaggtaaatgctcttatgttacaaaattgctaataaattaaatttcctatgttcttaccacaaaagccaaatatttgacttgatgggtatattaactagacttatcccacattgataaccatgatatcactttgtataaattatgttcataatataagacaaaaatgataaagttgtgcagaacattttgtaaaagacactaggcacagatttgtcctgcatcaaacattaacatactgtgaaactagtttactttgagaagctgaaagctgagaaagtattctaagtctgcttagtgcatgcagagagcaatgcttggctgaagtcagtgcccacacaagcactgttattatttcagaagaggaaacatgaataacttcaaaagcagcatcttttgagtcatccctgaaaaccttgagaccacaaatttacccagtacgttcctagaaagtattatgaacacataaaaccctactgcgtgtagattgtgtttcctcagaggacattaaaacagccagctcacatgtgaacacatgtattgagcagatcacaccaaaggactacttctactcacattctcatagagagcttgaagggtctccaggtcaaccacagaattgtccaagttcacaacagctgtgaaaaaaacaaaaggcaaagaaaagaatgtaaattaccacaagacagctgtgaaataatgtttagccgtatcagggaaataaagttcatgaccagcagtgggagtggacatgaactttaacttcagtgtgtacaactgccgtactccaaagaccatgtccttgggatttcaatggctcaggtgtcaaattttaaaatatttcacttgttctatgtgctggctagtttttatgtcaacttgatacaatttagagtttgagggggtagagggatctgtggttgagaaaatacatccataagatcaggctgttgggaagcctatagggcattttcttaattagtgactgattcaggagggcccagcccattgttggtgggcccacccctgggctgatggtcctaggttctataagaaagcagattgagcaaagccataagcaaaccagtaagcatcatccctccatagtctctgcagcagctctggcctccaggttccagccctgcttgagttcttgtccttaattcctcagtaatagaccatggtatacaagtgtaagccaaagaaaccccttcctccccaagttactttttggtcatggtgttttaccacagcaattttaaccctaactaaggcattacaaatactacatcccatgaggattgttcaaatgttagagaaaaaatataaatgggtctttcactgtccaactaaatagatttgatttttttatatactactagaaaggtaggcagatcattccttaaaacactgtgtcctagtttaatgccaataactgttcatgcatgccagcttacccaaaacatctggtgaaggttttgttcggtgtttatattaagtccatcacagatagaatagatcatcattacccgggaatgtatgtgttccttgaacaatctggtgggtgagtaggggttaggtgcagaatgttgtattgtagtttgaattagattgattcattgtaagttcattaaaatcaatgtgtttcccatggactttttagattgaaacaaggcaaaattgtcacttagggatgtgtgccaaggagccactgcagaagcactcatgggattaaagatttccaggagaaaaatcagtgtggataatcacaattttgatatatttattttgataactgaggcaatttgctatgtctctccccctcaaagcttaaagtacacatttactagttgatactggcaaaagtcccaagaaagaattaagaaagaaaagtggaaactgaagcaaaggatggatgagaaatctaaccaaggtaacataacagctctgggaacagagcccaaattcaccaacaaacgttgcaccaagtagaatatgatatttccactctaatagtaatcccctttctcaatttaaaaattagtgttcctatataaatccaagaggaagacttttcagccaaatctctttattattaagttataccaaaccacaaaaattactaaaattaagagattaattcatattatttgttgaggtaatatataacaaaatacatgaagcaataaaaaaacaactagttcatgtatggaattttctcctttagtctaaggaaaatctaagtagatctaacctaagtaattttgtaattcattagtgagtaatcgcccaacaaatttttatatttcttggtgacatagtgagagatttgtgggaaaactacaaaggaaatattaatattaattttagcataagatttcaccctcaaaacataatgaagtcatttaggattcaagtaaaactcacaagacacatttatctttttactatatccatcactttctgtagttattaatatcaaaatgatgaagattgagaaatcttttgccaagtgaacaagaagaagcagtgactcaaattaatctgaattaacaaaattacagatgaaaggagagacagtacaagggacaggaaattcagagaatcaggacactttttaaaattctgtattccaccaacctggaaaacctaaaagaagtaaatgactgtctaaatatatatgacctaccaaagttaagccaatgaagcaaataatttaaatagaattataacagccagtgatatagaatcaggagctttcaaatttctttttttttacaacagtaacaatatcccaataccaaaaccacacaaaactcaaaggaagttataggccgatatctctaaggaacaaagatgcagaaattgtcagtgaaatacttgcaaatgaattcaatcatcaaaagcctctctgttgtgatggtcagctttatcccagagatgcagaaatggtttcacatacataaaccaacaaacataatccactacataaatagaagaaaagtcagaaaccacatgatcatctatgagatctcatgtgatgcagaaaggcctttgaaaaaaatccaacagtcttttatgataaaagtcctggagggactaggttcacagggaatgtatctcagtgcaattgttaatttaattaaaaattttcatccaggtatacattgtatgttgagcacattttcccccattctcttttgccccttccatctttgttctcctctttgtttctctagaatttcttcacatataaatctatagttttatatagctatatacaactgaataactttaaaggagagataaatacacaatgtttgttacataattcactcagtatgattgcttcagttcatacccagagacacctatcttctctccattgctgtggtataaataagcacatggcactatggttttctctaatgtgtgttctgggccatgaactcagatcttattttagcaaggcatacaggttcctctctgagctacttccgcaaccctcaatggagtttttattaattttcaaattcgttttataagtttttgaggttaatattataccattttcccataccatttcctccatacaaactctcccatgtatctctctttattcttttttaaattcatgatgtctttccctgaattgtgtggatatatatatatatatatatatatatatattatattatatatatatatgtaacacttgttcagtctgtataatgttacttgtattatgttttcaagactgaccacttagtattagaaactgttaatagtccctgggaaagagtttctcctgctctcattattactcagctacttactaaagacaccttcaagattaagccagaaaactccaaaaccaagttttagaaaaaaaggtgtcacatcaaagggtactgaagaggaagaactaatgtaaaaaaaaaagtttaaaaaaagagagctagagagagtggtagtatcttgtcttttctgaattgggtctacttctcttaatcctttttttctttttaaactacttacctcatatttattttctaaaacttttagtgaaacattccacttatattaccatgcttttatgtttgaagaacccctttggctactaagaatgacaccagagtcatgcaggcaatagtttcagatatctgaaaacagtgtggggtggatgaaaacatttcattaacatctgcactggcttcatcgttcctggcagtttccagtggcagctggatgactgtagcagaaaagcagtcattttcatggagaaactggatgcttaacaaacagacactctctttgagcttatggggccaatcacattcaaactaccacagtcagtaaagtgcctgctgagcaagcatgaggacatccattcagacctccaacatttacataaaaatatgggtgtcacagcatgcagttgtaacctcagtgtgggaaactggagacaggaggattcctggaacccactagacagtcagtctggccaaagcattgagctccaggtacagtactagaccctgtttttaaaaagcaaggtagagaagtgattgaggatgatgcccactgttgacgtctgacctccaaacacatatccacacatgtgaatgctctctctctctcgctcactctctctctctctttctctcatgcacacacacacacacacacacacacacacacacacacacacacacacacacacaagcatgcaaacaaaaaataaaggatgaagtaaaatacagataatatgcacatgtaaatttaactgtaaggcgaattctcagtctttccctgggtgatattattcctcagccatcctatgggaatcttaccagatgtttggcttgtcattcttacatagtcacatgtatagctcttgaatatttcaagtcattttgaattatgtagagcctatctatgttaaatggaggataaatcaatgctcttgtttttggattccacataaaagagcagcactctgaccctcatatttgtaaggccctataccttaatagtgttcttctcattcaagtccacaatttatgttcattaagatgtttaatgtaccaaaatcaataaaatgttatagtttcccccaaatcatttgagacttaaatctatgttttgaaatgcacagacttggatgtaaaacatgggtctgcaactaatcagctctgtgtttcctggagggaattttaggctctttgggcctcagcttatagagccataaggaaaatggctctatagatggccagattgttattaagactagagataacagctctactgtgtggagcagtctgcaatagtcgtgctcaaaaatcgagtctgatgcaaaagcagaaggggcttactggaggggtgactgggccagaaggagggggaaggggacaaagtagagggcgaggattaacaaaacaaagaatgtatgaaaatgccaatatgaaactcatttctttgtatggtctgtttaaaaactccttaaaacgtccatatatcttagcatacagtaatgctatgtaccattgtagatatatttgttccttgtaaaacaaaatatgttaaaaataagtttgcacttcatatttccatgacagcatattagcatattagcatgacagcatgctagaaccaaacacacaagtccaaccaagtaaatcatctgttttacacacaatagagaactatgggaaagtcagaaatacatcatcattggtaacacctaaacagttcttccacacaataacaatgctgcaaagacccatgccctttccttactataaaaacatatctgcaggatgttaaaagggatcatttccctaaagggtgatagtcattcaagaagcatcccttacaagattggcaaaggatgcaattattagaaagcagttgcattcacccacaaaggagacagtgtatctttctgaagtcaccaaccattcatacatgggacaaatattcagtgttcaaaatgtgatctggagattcttcctaaccctaaagatagagtagcaaaagtggcaggtacagtccctccccttgaagacttcagagattcttaacaattaaaatagtatgtcccttaaaaggaagaaaagtacactgtaaattctgttgtaaattcagtaattttgaaattcaccttcatttaacctatattctctttttagggaattttattatggtttgaaggccagaattctaaatgttttacatacagactatagactttctggcagggaagaaagaaatcaatgagacacacaactcaagactggtatgtgccaagccaccttccttacatgagggtaaggaggtacgtttctgattaagtcggtaggctgcatatacctataggccctgttactaagaagtgtataagttaaactattggagaacaaacgcattttgtttgaatcagtatgtcgccttcttgtctgggcagggggaaaaatggatactaagactgtaatcctttccgcataaaatctttaaatgcaaacatgattgccattgtagatggtttaatctggtgatattgtatttcatttctgttttcgaagaggtttgttgatttgaccatagtgggtttgactccatgcttatctcaactgtttagataagacatgtttgactttggcaggtgacaaaatctagggtgtggaataagaggtaggaaaaagcaggctggcaagttcccaggtagtgtttattttaggcatagtgtatagatgagtaaattgcttcagacaactcactggactttgtgtaaaacccccactgtctgcggagtgttttctgggaaggagcactgcacaatgtcctttattgggcataacagacttcaccttcttgcttaggtaaacatttacactcttgtaaatgtaggctcagtgagtttcccccaaaacaggaccccacctcttggatcccatctttgctcccgttttctgaatcatgcttttaaaaagtgagagtattaaattttctttcaaaagtaaatatctatattacccaagaaatatatgtcttacaccaaaataacttagatactgttaatatccatatatatttcagtctaattctcaaatccatcttaccttgaaggaacttacaagcagaaaagcttgcatttataaacacaataattaaagtttttagagaaaaaaaaaacttcaatataattgacggaggtgatgttagtaagtttcagcatttatatttttatttggcaggcacgttgagggaagagaaggagctaagaaatatggtcagtgcacattataagaaacagagaaaaacacaaaaaagcaagcttagcagagaattgtcgatatagaactaagaagcgtagagctaaaactagatacatatgaaaaattcttttgctacctacagaggcaaacctacctaacaacgtgtacttcgtggcgactttttcaaaacaacataaaactacaacactcttaatagctgcctaatagctattagctgctttgcatagatgttaacaaagtactcaaaggaacatcagaggaacagaggaacgatctaattatcttatggtctcagagggtcagtccctccttgctgaccccatgtacttgtgaagaaaatcacaatggtagcaccatgcattaggtgagagtcttggctatgtggtgtgtagtaaggaggaatgttgggataaaggaagaaaacaaggtgatgtgaatgaatgaattattggcccctagtgctaacatcttctgttagcagagtagggcaagtcagtccaataaaataatgaagcatcttaatattcactaaggtaatcaaagtccctgacatgttttttacaaacatctctacttgagaattcatgcctttttacaatgtttcttgataccctccatatctaaatttcctccccatctcttttcagattccctctacccacaaccctctaccaaattcatagcccagagtctataatcagtgctatccttatgttcatgagtgtaggaccattcaccagtgcataggcaatataataggggccacctccttgaagaaaactgatctccctcagcagacaaggttccttagccataagtggtattttgtgacctctccctatttggggtgggtttttgcatggctagatctgtaggtcttgtatagcccagtgcagccacggtgagttcatgggtgcaacagccttgatgcatccagatgaaagtttcccagaagtcctccctaacctctggctttcataatctttctgcctcatcgtagtaattggtacacaacctgccatacttaaacaccttcttctctgtggcttcagcatagggaagatcacaccagagcacaactagagccacaaaggcagacagatgatccagtaggctgtgataataaaagaatatatagagccaatcttccaagcagcccattgagtgaccactatatgtaatgtgaacatcagctttttttattctttgtcttaatctctgccccatctccttctccttctggctcctctcccatctacaatgtgaatgctcactcaagcccaacactaggattctacatacagttactgcagttgcctagagcagaacacaatggctttacaattaaggaagaaaaatgattgtacatcattttttttccatcttaagcctttgatacaatcactaagttgagaattctcaggaagacagcaagcttagagcatagtgcagggtctagatgtctccagtctgtagcacaggttcactgtgatttgggattctgtgcacatctgcctggaattttaggaaaagaagtaaattacctgtatcacagagcagttggtagtctacacagtaatgctgggtattgagtattattattagaaactgaatatctttacatttgaaaccataaaaaggcatgggcagagccttgcagatgacctcctttggcatttctcttaattcataaactctctttacaactccattcataaagtgtccatatcgtcatgaacaaagctatcaaaatgcgccctggacctgcccattttctgtaaaaagcctattagtgtgctccagtagttcaagcatgggcaacacagggtccctctgcagtccctcgcaaaagtgacaaaaggggcctgggaaacatggttagggtaggtctttctacacaagttatttccctagctgtgtgcccacaatagtctgattcaaaatttaaattaatctctgtagaatgcttgcacgcagttcatctcagaacttaaacaataaagactcgtttaactcatatgaaaatgtatacactgggtttggtctgagaacactactgggaaagtggagatcatatatcacggagaggacaatgcaaggcctagcagcatcagccggacgatgatcgcaatcctgccgaaaggttaacatgtggtgtcttacccgttcaatctgatggctgcaccctgagcttcagggaacagctggggttgtgtttctagaattcaccatgtaggaacaggacgtgtgtggctcgataacaaaaggtagaacacagcggcactctattctccctcacctatagcgctatcaactggtggggttgggggttagaaagctctgcaggcagctcaagcacagtcaccttgaagaagcacttgtgcagagaacgtccaagaagccagtttccattcacaaacatgaggtgaatccccagccatctgtttttttgtttgtttgtttgttttttgtttttttgtttttgtttttgtttttttataatactctcaaacactgaattacccaaaattagcaatccaaacctcacctttccccaaggattatacaaaagtgttgtttctgtgtcaaccactccttcataaatagtggctcgagagtcaagctaatgtgaccaatatatcctcacttggtgctctgcattcagatctgcgctttgcctccacacatgcccttccaggcccggagcattctgctagcacccaatgacttttgcaaacacctaagtattacagggatgccaatgccatgaactgctgtgagctctaagtttatgtttgcatacaaaaaaaaaatccacagtacagcaaaaataaacacacaaacacatgataaataattcacataggaagtacaacaaagagaaaggacacatattcgcagttaggcaaaccccaagttttatgttccttctgcccataaaagcataatcaagaaatccaactctccgagtatcataaaaatgtaacaaaaaaattcatcttgaggctttttgctgagcctgtaagaaaagatttaacaataaccatttccccttgacttcataatctacaagtgacttaacatgatgtatggggtctttctttttgtacgaaataactctagttaatgaactttattttaaattaaagcatattctgatattgaatttctgaaagtctgttttaataaaagcctactatctcacatgtctttttttccatccactacaaggctacaattgataaaaaaaaaaaaaaaaaaaaaaaaaaaaaaaaaaaaaaaaaaaaggttaccctgggctcactgcagtccacctcttctcaaatgtctgattctaactgacttagcatttcaatggaaaccattcactccactatccagcatttactctgattttaatgtcttgataaatataataaacaggtcttaaaattctatatcccatgtgaacaaaacacttcaacgttagaaaaggaagaggagggaacatgaggcaatgcctacgcaaagccctgaaccctgcagtttcataaagcaaccagatactggaaaacgtaatgggaaaacacaacattaccaatattgaacccaatttttttagagcattacatgctaaaataaacaaatgattatggataaactttcttttggtaattaataggcaagtggaaaaaaaaaacaactcttgtctctaaaaaatgaaacttgaatctacatgaaaacagacctgcagtttgtaatctacaatgtgtttatagaaagttctgcatgaaaaacatgattcggtggcagcccatcagagtacaggaactactcccagcgcgggtcacctaaaaacacgtgaaatgtcaccataataacaacccttctgagctgtagggattcagagaggccccttccagaacttgggggtttgtaaagaaagcacactggcatgttttactcataacttgaagccacagtgactaccagggaaaatcgtatcacaggaagaaatggaagcttctgtctgtgtcactattgagagcgtctgctctcacatcctaccctaggagtcattgctcaacaaagccagaatccattcgacggctcccttcacatgccacccagagccaagagctatgcatgtgaagtgcagctgactcactcagcatggagacaatgtttaagaaaccacacaatgatgggagcccttggcctttcaagtttccaaaacaaactgctctccttagtgataaaacaccgtccagagatacagctgtgctcaactcctaagagccactgatgtaaataattctcatatttatcttcattcagaaaatgcaaatgaggatgacccccaaactaaattcagcatttctctaacaccggctgagaatgcagataatgggacttagatgtgacctgctggagctgtaattcccagttcctccctctccttcctcttactcccaagccctgtctgtgagaagaactgctctgtgtgctactcccacctccagttcacggcaacagtctgcaggaaaacttacccagcataatcaagaaagaatagcctatatttcctctccttgggtgggggggggtcgtctctgtttcaaaggcatgcaagtccacagatgcatatcatttctttagagggacagcagaatggagcggggattcagtgtttaatatgggagtactatgtgctgatgatagagaagaaatcttggacagtttataataaagaataaactgagcatcagaacgtgacatgatttccccccagcccccccctccggtttactcaactcaccagctagcaggagaactagaattcaactctatctcaatcactttgggctgtcatggcaaaatgccacggactgagtgacttaaacaaaagcaatttcttttgtcacaattctacaggatgggaggttcaacactgaggtgttgggagaagctgaagatgtaactcaactgacaaaatactttcccagtattggggaagccctggcttcaaacccctgcaccacctgaatcagcatggcacagcacacctgtatacccagcgggcagaagggaggtcaagacagggtaccctcatttatacactgagtttggggctaactgtgatatgtgagagcctatggatatcaaaaaacaagtaacaacatagaagcatgccaatggtattaaaggtaaaggctcacttatagcttgtagacaatagacagctgcttgactactcgcattgccccacagaaagtggggagtcagaagagaaagagagagaaagaggaaatgatgtacatggaacactctagtctctctactctttagaagggccgtgattttgtaacagaggtctcatcttcatgaacttaaaaaagtcatcacctccaaacagcatccccatgagaatgggcttcagcatatgaggatgacacacacacattgagtctgtaacagcatctaagctcttggccccacaacctgttctctagtcactgatagctgacatctgaaaggggatttctgaaaatccatggaagcagtgctactgtgaagtatatatatatatatatatatatatatatatatatatatatatgctatagatgttaaaatgaaaaaaatgaaagcaagcataccaaggactagactaggctcagccatttcattcctcctgttgtctatggaaaatcagaaacctgggaaagttgtggtacattttatacattgctttctgtcactcataagttcattcattggtttacttcttttcttgttgccatgatgataagatacctgagagcagcaagtaaaaaaagaaagagtttatagttgcagagggatctagtccatcactgcagaaaatgcagggaggcagacatggtaggagaggcatgacaacagaagcagggagctggttggtcaaattgcatctacactcaggaagcagacagggagcagaaagtgggggcttacatggccctacccctacttcattccactgcagctcatcctcttaaagagcccacaccatcccaaacagctactggagctggagaacaagtattcagatatgggagcctctggaagatatttcaacttcgaaccacactactcatgatgactctttctgtaaatatttgagttttctaaacttggatccactcagcacaagaaacttcacttggtgtgcaatttggtattcacatactttttttaaagtaattcacatatgtgaaaacaattcataatttcatttccctaaaatcaataactagggaaattgtgtgaccataaatactcttagaacataaacactactgaggctagcaaaatgcctcagcaggcagttgtgcctgccacacaaccttgatgatctgggttagattctcagtcaaattctgaaaattgtcctctgacctcaacacatattccatggtatatatcaaacccatactcacatatatatatatatatatatatatatatatatatatgtgtgtgtgtgtgtatgaacacacacacacacacacacacacacacacacacacacgtatgtatgtatgtatgtatataatatatcttccacacacacaggccccaacataaaaactgaaaatagggctagagagatgactcagaggttaagagcaccaactgctcttccagaggtcctgagttcaattcccagcaaccacatggtggctcacaaccatccgttatgagatctggtgccctcttctggtgtgcagatatacatggaatcagaatattgtatacataataaataaataaaatctttaaaaaaaactgaaaataaccacaatctggggttagaaagatggcccaagattcaaaagtatgtattgttcttacagagagtttagcactcaaattgaggcactcacaaccacttgtaattacagttttggggaataagaaacattcttttgtcctctaaaggcacccgtactcgtatttgcatacccacatacagacaattacagacatccacttaaagatgtatattaaaaaaatgaaacaacactttaacaacagaaataatatcgactgagaagaaaaacaatacaccccctttttataaccatggtctaattgcctatcatctttattttttatagaaggcttggtagcttacatcattattatttaatttatgttatcaatcaggtttaaacaaaatagaaattttatttagaaaggacataatccagcattcattacccacaggtctccttagttcacttaagacagggcacacattaaacaccagagggaataaagaccattaataccttgggctcatcacccctgcaggatactgaagctatttctatggttagagtcaataagtatatatttggtatcccctgctctactacctataatctattcaaacttggcagagggaatgtgaaggtatccacagtcagttcaagcttcagttctaggggcagtcatgagtcctacaacgaaaggtccctgtcttggggaattgttgcccagcaccatggaagaaaactgcacccccagagccagctaacacaagaagctcagctagtttcatctaaattaatgctttaaatgccaaagcacagagcccacccaaatgttttacaaaaatctgcatgttagtgtctacaattggcttttactggtgagactagttttcaaaatatgtggattagctaaaatctcttaggaattttctacctaaactcccttcttctggagtcaagaatctcctaagagccataacttggatatttgaggatgttgcctgaggtttagcatccagacacataggctgggtttgatttctaaatgtctggtgcagattaaagggtcacagactctccctccatgatgtgcttgtatctgtaggggataaatctttcctcaaaagtcagaaggacaagttaggcaatcccacatttacaaagtacattttaaatggttttattcttgttgttctataaacacttgtttaatatttagcagtattgtgggaagaaaattagctccgaagcctgcttcagtttgatctggcagcagaataacattttcattttatacttgtatctaaggctattatttttcacatgtactggtgtgtatgaaggtgaggtccgagtgcaccaggcatgtatgtggaggtgagagggcaactttcaggatcccggacacagaaagacttgtatcccctctttcctttctgcctttggccttaggcattgcataagccacttcccacctgttaccttgggcagaacatgacacagtgattgatggtagcaagactatgaagagagcctggagagacggctcagcagctaaaagcaactgatgttcctgcagagaccctgggttcaattccaagtacatataggtggtttcataactctccataactccataagggatcttctacacagacatacatgcaaacaaaacacaaaacactcaaagatatatatgtaatttttaaggtcatgagtagaccttgacatatagaatgccaatccaaccctcatcattttaacaaggcattcaaattagaatcatgacaaagtaaaggcaattctagttttgactggggggggggagcggttccagtaaatctaaatgaggtgatgcaggcctctgtatgaaaaagttatgagatgcttttgacagtggtgagtctaatctcacaatttctaacttggtttgtaggtgaaagccagtatttggatggccaaggtgactccatggcacatcagccctgaaaatttccactctgatagtttaggataacctttcaaacctatggacctcattttagagatgccagcatggctggtaggaaaagagcaattcggaggagtgacatatctggtggaaaagggtagccatgcccaatgaagagacttgagttcatgtccaatctgctccattaatgagccatgcgacattgaaaaaaacattttagccccctaaaatgtcttagtcttttcttctataatatgacactagagatctggacacattttgtagtcactttcatatccctaatcaatgatggttacatttccatagatttctcagtggaggtacatcctataagtgaagtgtactgtaagagctttcagagatcccaccctacactaaccctgaggcaggcaaacaggtatggctgcttccttgtccagctgtgaaggcagccacaacttgagagattggatatgcaggttttgaagggactcaagcactcccgtcgcatcctaataggataaggtttatgcataattctgtgtgacccttccactactgacgttcatgccatgttattgttcgacttgcatgttaagcaagcaaattttcaatgaactctcgctggctgtgccacagacacagatgtcaggcggactcctttgttcataaggttctcattattagctcaacccgagctgaatatttgactgaaggaaaagaccatatcattattttcagatttcatcctatgacttaactgggctacatctgccagcttcagaaacagcaagtgctgcttggcgccagccttggcgttcttttctgtgactattaccccaaatgtctcagcccaaggaagcctcttctgcatcaaaacaatttaataaaaactaaaattctgattaagagttactcatcaattgacagggcaggccacactagtgctatttatgaattataccccatgatatttcaggactaacaaacagagtctgcattcccaaataggcaaactagaaagccagtgaccattttcatgatttacaagctctctcttgtacttgaaaccatatttttttaataggtaaattggcattcctttgaataactcgatctgctttaaatctattctaatgctctgggaagcataagggagattcaaaatacttatatttaattcttctattcaactttggaccatctctcagcatatatatgataggaagctaaggcataggaatacccggcaagtataaggcaaaatgcattacaataatgacaccaaagccatttagaaaaatgtttcaaatcacccaaattccacacttaaatatcccataagcccattaaagaacataaaggaactaaaagcttccatctgtctgtacatcaccatcaataatgcaaatcagcaaggataatttgaaatcacctttgctgatcattaggaaaggccattcaggggctgagaggatggatcagtggttaagcatgcttgctgctctgtcattagaacctgaatttggatcccagaacccaggtcagggggttcatccatgcctttagctctatcttcaaagatctgatgccctcttctggcctctacaggcacctgcacatacatgtgcaaacacaaataataaagttaacaggtaaataaataaagcaatcccatccctctatagtagaggaacctggggtttctgctacagttgctccaaatgcctggggaaagaatgaccaattttccaccagaaagtcacatgcaaaattaaattgccttattctttcaacatcttgcagactcttggaacatgaggacctaagggaatgtgccctgtattccagccaatgttttaaatacatctcatagacaaatggtcactcagccttttaaaaacacctgttttcagttcctcactaaacatagcaatttattccctaattgccatctctaatcccaagatcatccttaggagaaccaatgcaacaagcacttctgtgaatctcatgctgggtggcactgatctggtttagaattttaggcttatccatcaagcacctgagactcaaggctcaactagcattttctcccttgagtccttctcctctggacagttttaatggttaggaaacccattatctgattcacattagaatttattagtagcttttacacggtggcattaagatatgatctaactagttacagagctagcaggaatcatgctttgtatgatacaaaatctgaatttttataacaacagactaagtatatttacaacagactgagggtttgtgaccccactgtttgtgtgttgcaatgctaatccccccaccccatcctgtcatgtgttggtgtccagaatgagggtttttgaggctccttagaccttgagaatggaaccctcaggaatgaaattggtttctttatgaacaaaatgtagtagcgctcacttggttactttctaccacaagtaaaatacaagcagaaaatgattctctgaatcccgagcagggccctcaccagagtctaactgtgctgtgaccctgtgctttttagaaccaaaagaaacacagtctttagtttaaaaactaccactaaagaacagaatagaaacatcatgtgagaattagacctttaacatggtataaaataggaaggaaaatgatattaatataacctagcagggaaaaaaagcatgaattatatatcatgttacaggaaatatactaactgcctgaatagaaccttctagaaacatcacaaaatttagcccaactgttagtattaagtgactgtgttttaatttttttacacttaccatgttgtatgtctttcatatctaaatgaagactagacattagaattcctactgcttgtgatcttttgttgctaagcaacttgacaacctgttcaagaaagagtaaaaggagaaacattaacttaaaccctaatatgcttagtaacattttttaatccaacacgaagaaccactaaaaagcagagcttgcatcattactacttttgaattttctataccaaaccaataaaatccatcatttcttccaagtagtcaccattggtctcaaagtcaaattgccaagagtctaggaaattagtctggttacctgaagattaaaattacacatctaagcagggcgttggtggcacatgcctttaatcccagcactcgggaggcagaggcaggctgatctctgtgagttccaggccagtttggtctctagagcgagtgccaggataggctccaaagctacacagagaaatcctgtctcgaaaaaccaaaaagaaaaaaaaaaagaataaataaataaataaataaaattaaatatctaatcatatgctacctgagataaaactttgaacagctggcaaacaagggcaaaatcaaactatacacaggaaatatgccagatcagatctgttttgtaaaacagaaaatgtgctccattaggtagtcaggtcttgtgggtggcccttattttcctggtggctcctttcattgtacatttgatccacattggttggacaatttccaactacttaatagaagaatatgagtgtcatattagatggaacacattggcctgtccccaagtctttctgtctagaaagtctgaaagaatctgcgtgcataccccagtcaaatctcccaaaatagaggtgaacaaactgctagagtatatccatgcttgaactatattctccaacaatgcacattgccatgatttcctgcttaggagattttattccagcaaagtctgtctgctctcctgttctcttttaaatccacttagagaaatagctaagggaagggagcgtgattacagccagattattggagtcagttgctgcctcacaaactctcaccattagtgacattgccttttggtttaagttgggtcagtcaagaacctaataaaagaaacagacccagccgacataaaagtattcatcaaagcagtaacagcactcttggtctcctggcaggaatggggaaggtcattaaaacagcataattccagaaagctcccaatatggtggacaagaccctccacaagagatgctgtggcctcagaggaagaacaatggcagaagagtttattattgttttctttcttttaatagtttattagattggacatacaaaaaaattggtctcaaatgattatttattaactacttcaacagattgtcaataacattgtctccttcagagctaagaaattagaaatgcattgtctggaagtaagttatgttctgaacaataattcctaggttcagggacaggcaatctgggccccacttgtgctacttccattaaaattcctaatcatttctgctccttagttgcaatggcacacttgaatctgtgcctcatcaccatgttgttcacacccacagctgctctcctcatcatggctctgacaactcttcctttggaaaccagatatcaatagtagcttcagtcctgttctccaggcttcattctttacaatccacaatttctctcatatgacatatacacctcatccactcagcaatttcctactttcctaaaagttatctcctttaaagttccccacatagtctctatttgactccagggagtcacaccccaaatatccagccaatgtctccttctttactttgtatgttggaataagggtaccaccatcatctatccatctatcaaagctgaaaactacggtatcgatctagacctttccctctcctctgcttgtaggacatactgggtagtcaagggcgatccacctgtgtcttctgaggctgtgccctccatctcaatgccagggtttgcttttatattatattttgcatagatcaaagcggaaagtctgcaatgacttcccaagtccagttcggtgtttctcaactgccttccttacacagtgaatggttcatgatcaccaccatgaagaaatttacaaatgcaagctcctacactgtaactgaaacccacttaccaggagatctgagagtaggaatatcatcgccaattttgaacatcccctaagggattctaaactactgatggagtctcatccttcctgcccagcctccttacctatagccaagcatccttctacaattgtcagaatcttgaccttgcacctttactttgtgaaccggagtggctcctgttaggcaatggtctccatgaagaccacattatcagtgccacagttcatctgaaacttaccctttctgttatttcagaaacactcaattccaaactgcaatttatattccaatgcataagacaatataaacaacaatctggcatcatctggaaggaaacacactcagaagaaatcagaactctcaaaggacagcaatccatccatgttctaaagtctatctctgtatgatggatgaatcaactcatctgtccttctttatccaacaccctgggtaataaggacccaaagatctcaagctagaatattcttagaatccagtgaccagagttacaacagagatagacaacatagtcaggggactcacggactcctagccaaaaagtagaaaatacagaactaacatattagaaatccacaggattagggcatataatcagaattttaaaaggatccatttggtttcctagtcatattagatccagttaattcacttacagcaatggttttcttaggacttccctagtaggcagggggatatagggattgtgaacaaagattctgcagaagaaaccactgcgcctcacgccttaaatgcactgaattatctgggatcttttgaaaacagactctgattccagactctaccaaagttcccagaggatgccagtgctgtgaagcatagaaaatgctgttccaagttctcctatttccaccttaatacagtctagaaacccactgcaatactatgggtccaacttttcaaccagaaaaataataggagcagcgacagaaacttcaaaaagctgtggaataataggccatgtgctgctatacggtaggggaaaattgggagatgctaaacttacaacacaaacaaatttgggcatcttttatcttaactgggttcactcaatccactgaggtattaatttaaatactataaattaattttataaaacagaatacattaatcattgcatttgattttacaaaagaattactgttctttccctctgctcctacaattaaaaaaaaaaaagcaggcacatatgactgggagaagtcttctggtagtagtaaatgttttctttaattttttctacttaaattatttcccatacccatcactactgagacaaaatgccagggaaataatgcaatatctagccatggaagagaacataaccaaagctcctcacaatacagccccagtcaacacttttaggacctaagtgtagacgaactaggctgcatagctagaaatgggtataaaatgagcattgaatgctagtctgaatggctatggcatcaaggagatcacaatggtctgtttgcactgcatttataaaattttctcttatatgacaatagagtagccaagcaaatggaaatacagtcgcagatttacatgaatatcgatttgactgtgctatgtcgcatcctccttgcctagctgtgtggttagatatagagctttctaataagaagaatttgggggaattttgtcctaattaaatcactgagtagtattccattaaagttaggcacaaatttccacaagacaaaaataaaaactagatgcttcaactggtgagtgttttattccacctcacccagtaatctgtaaaagtggccaaggcagttttactgtgtaaagagagaaaagggaagatgttgagttggaacacagccaattcacagcatggctcaggcactatctagcaggtgtatataaacagccgggtgtggtagtgcacacctttaatcctatcactcagaaggcagaagcaggtggatctctgtgagtctaaggccagcctggtctacacagcaaattccaggacaacctccatagcaatacagagacaccctgtcgagagagacagagacagagacagagacagagacaggccttaaaagcctagtactatgttaaaaaacacaggggaaaaaagattccactccccacttacttgttttacctccaaatagtgcttaagaaaataaaacagcatgatactaatatactatgtgtgcctattaggaccagtgtccgatgtctctaaccattaaaataaaagagaaatccttaatacaattgccctaataggagacctgcaagcaacaaactgcaaccagcattagcagaaagagaacaaaaggctccaagcctctaaaaccacagtaactaatactgaacaacaagccacatgtggctggccaggcatgggaaatatgcacagacctaaaagattctgggattcatgtctcttttaaaggatatagcaatgatcgccataattttttgtggactgaatgttcaaaaggcaatgtttgaaccctgaatcctatataatgccttctacttaattgcatgtctttctgaataaattctaaaattcgactattagaaaatttaaagttacatacatagctggtagtctattttgggcagtagtggttaagacccaacaagttcataagaatgactgaacacatttacctttaactggggcctagatagcttatctgtatctctatctcctccccttcatccatctatccatccatccatccctctcacccttctctcctccttcttctccccgccactgtgtgtgtgtgtgtgtgtgtgtgtgtgtgtgtgtgtgtgtgtgtgtgtgtgtgtgtgtgctcgtgaagttgattttttttaaaggaagataaagcaggacttggggggttgaggcataaggatcagatgttcaacaaacaaacacaccatgtaaaagtctaaggttctttggtcattagcaggcctcactgctatattagtaaaggaactgcatgctacacctatgtcctgttagacagcacaatcatttacaaggcagaaacatactgagaggaacagcaacaagaagagagaatcccagatcctcattgagtttatgaaattcctactttcagttataccacaatgtccccagagaatacaaacaccccgtatttgaatcctttggtcttttattcagtttgcatggttgcattaattaaatgaggctcacataaccagctaactacaaaaacaacacaagcaaacctatttatagtaattaacacaatttcttccactgtttatagcaatcacaccctagtattttaatgtcaattttagcatagaaataatagtgcacataaagtcaccctcagacataactatgacccagagtgtatttccacattttcattaaaacctcccctacatttttcttctgtaaccaaacacattcctcagcggatgctctgggagaagcctaatatgggcatgatattgatgttggctaaaactgtttgttgtgttccacagtctttccactgttcttgctctccctgatcccacccaccttttatttttgtccttaaaattttaccctttcctcaaaaatcatctcatccatttcttttcctgccttcataaatagttcctagagggtttgttcccttttgctctactagggaattgaacccaggaccttgtacatacatacaaggctctaccactgagctgccaacccagcacatacttctgagcttcttttgctacttatttcactgtactgattctctcctgtagctgcccctatataaccttgataccaaatgtctcctctgctcttttgttgtcattgttgcttttctctacagttcaaagccagacacactatggactgtgggtcaaaggtggaacattacagaagaacttcatgtgactgtccaggcagcaagttgtctctgtcaattctagagtttaacatattatccttttgtggtctttgatggagttgaagataaatagtcatagttatagttttccttagttatgataaaagataagttacatatagactttagactcacaaagatagaatagatgatagaatattttctttaaatcttgctaaatgttaatggactaaatattgtaactagagttcctacttgataactgttttgttatatacaatttgactatgttaaagttaaaatctttttatttagacagaaaagaggagatgatgggagatgtcattctgtaaatatgtttctcttatcggttaatgaataaagcactataggccaataaggaagcaagataggcaggactaggggagaaggaggattctgggaaatgtagtagaaagtcacaatgtgatccagggaggagaggacacataagtctggcattctctgtaagataagaccttgtagaaatacatatattagtagttatgggttaatacttaagactgagctagccaataagaagccctagacattggccaacagcactgtaactaatagagtatctgtgtgttatttggggttgacatggcactgggaccaagctgacaggaagagttatcataacaaccaactatgtgtagttttctatctagcaaactatttttggtcaatatctactaaaaccttctatttagatgtcttccttcctccttgacttcaacatgaccaaattttaagcagatccattttacaaattaaaggactattatggcagttgtcatgtttaagattccatcttataggggctggagagatggctcagcggttaagagcactggctgctcttccagaggagccgggttcaatttccagtacccacatggcagctcacaactgtccataacttctgttccagcggatccaataccctaataaagacattcattcatgcaggcataacaccaatgtacatgaaataaaataaataattaaaaatagacaccatgttataaatcttttatgttataaccatacaattttggcatttaaactgggcatcctggctgcctagctaacattccattttctgtagcctttttgacaacaataaaaatcaattttggacaatagattgcaaggagtatgagttagattttactcactatgacaaatacccaaggtgatgaacttataaagagaaagaacttattatgttacacaactttgtagatttccaaccctagctggttagttctatcatttttaggtctggaaaaccacttatttcacaataaaaaggcaaagaaatagaggcatccttttgaaggcatgtccttcatgactcaaagatctcctactgtgtcctccggtctattaaaatttccctaacctctcaacgctaccaccttgtggaccaaatctacacaggtatctttaggaaacatttagcatccaaactagagtacagcaagaaagcacggcttctggagagagtggtgtgtcactgtcaatttcaggtttactctcttaggctccaaaacaaaattgagaattaaccatcttttccatcacactccatcctgaggctgaaggaataaaaaggctgagatacttgcagcccatatgtccactctgtcacaaaggactggaaagaattttctaactgataacatctactaaacaccagaccagatattgtgcaacaggcaatgcctacattgggtggcttaacagatgtcaacgggaagtagaaacaaatatcctctgccaaatcagctgtctcaccatccatatatctcagtcagccatccccatccccagtcatctcagtgggaacatttgactcattcttcctcgttgttcctatccagtcacacattagactccaccgatgattccttctcgatctttctagtctatcactagagcctccacctcccaccccccagtgccaacatgtacaacctccttccagatctgcagcctcaaggatcccagttctaagcccagatgaagaccctgcactgtcttcaccctcccagtgccctgtgctagatcatctgtgcccacgtgtatctctgctttattttacatcagggtgatgggcagatgaaatacttactgggtaggaaagttgaagcttaattcaactgagacacctttttaaaacaatcccagcctctcatacaactcctaagggctggcttaagagcttcttttctctcatagcatcttctattctcctactagaacatatacatgccataataatttctgggacattctctataaatgcatgtactgccagatgtgaagattatgccatattttctacttcaatactcagcacaatcactgagaaattacaggcaataaggtatagtgaaccagatgaccttgccttaactagtatatccatgccagcattcattcctcctgacaccttagaaagacggtttctggtttttgttaaacaccaaattacctgcgtattttttttcttgcttttaatttttatttcatgcttcagggattgagcctatgttaaacaaacattctagcactgagatatataccgctgatcttttaagataccaaaaagattcccgttcaccacactaaagaatcacttttccatagaatatacagttttcttaaactttcatatctggtgctaacacagagtttttaattactgaaatgtcagtagtcaatgaatgtgtgggcagctattctacccataaactcaagtcaagaactacagtgtgacatctgtcatttcgtagtcttcctaatatatgatgaactatactgattaactaaaaccacatttaaataattacctgattatacttatgtgtgctcgtcactttgaatatttttaaataatatattttgtatgtattacatgaaatatagataattattatgagctcaacattaaaaggatcaactttaagtatccaaataatttgaagttttatgcacttaactaataactaatgaaatcagaaacttgaaaaggaaactacataatttgctcataatgtaaatgcaaagcccaaataagagttctgttttccaaaactagttaagaaagaatgctgttttcttctgaaacaagacactatagcctctctggaacctggatcttagattaggggatatgtagacagatccaataaggtaaatacttcagggagtggggtaagaaaaaacaaaacagccatccacagaggttaggcaaaggtgaatcccagagcagaattacagaacacaaagaccactgcttctcacatagatatttgagcacagcacaatgtgccagtagtagacaacacatgtgagcattgaaagttgcacacaacagccaagggcactctaatgacaaggctcagaggagaatatgagcaaatgggaaacagtcacacccaactgagcaagggatcttcagattgaggaaatacagcaaccaactcccaatcttaggaattttagttagttcatctatttaatctatttagaggtggattttgagatatgtctttatctaaatgaccaactatgtaactgtggacataggtctttggtccacagatcccagttttcttgcttgtggaagacagctggtaatccatatgcaatattcccataattgaagataaacaatatagcacttgaaatatccataaagtataaaatgtcatgcaaatgccaagcatgttggtactgaatttaataatcaaacaactatcagttattctttataacactgtagaaacacatgactttatcctgacaagaggaatgccacagttaataataagttgtgggcactaagcacctagaattaagagagaccagctcagacactggctcatcccagccctctctaaggaatagttaggcaggatatgactatcctgtaattcttatttggattcaattttctcactttgaaaatacaaactgatctctcattatctggcccagaaggaattaatgaccaacaaacagccttctctgagccatcttatactacttcataaaacaacagacacctttaatcccaactggcttactctcaaaaaggaaaaaaatccttgagttggatttttgcagattgagagcttattggagtttccttaattcatccccacaaccaaagagaagtgtaatcttagttacagagtcaccttctcctaagattagcatgaagcttcagggcaggatggctggctcaccgccaacagcagctttctaaggccacactaagcatggtctagcgataggtgtacattttcagataatgaaggatcgagcaggggcctcatttcctaaacacctggggcacagcagggcacttggtgacatgacatttgacacctctccttgatgagaatccagaagccatccttttaaaaatgaggcatacaggagcacaattgagctggtatttagcttagtctctaaggtgccttttggcatgagggtgaagctttatctgacttgccttggcgtctgaggcagcctccaaactggaagactgcaagactctcagaagtggagtttggtgagttgccaaatagaacttctctatgttctcacagcctgccaatccgttctggttgtcaggccttcagtttagagacttgagtctctggatttcagtagattctattccttaatggggcagtttcattttcccgacttccgttagcaccaactatgggattcctgcttttactctcattcggtccacaattctaatccccacgttttgattctatatctttggctatgcaaaactaaaagaaacaagaactgaggtacaagcagcaatagtagtgattcttaacctgtatgctacgacccttttgggatcacatatcagatatacattacaattcataacagtagcaaaattacgattataaagtagcaatggaataattttatggttggggttactacagcatgaggaactgtattaaagaatcacagcattaagatggctgagaaccactgagctatatagcatatgactcccaaccaaataaaatttatctatcctgttctcttcttcataacaaagacttgtcctgtcatcttctgacattcatgtatatagagagataagatacagtaaaaaaaaaaaaatgcactggaaggtggtggtgcatgccacctagcactggggaggtagaagcaggcagatctctatgagttctaggtcagcctgatatacagagtgagttctaggacagacaagctatacaaagaaaccctgtctccaaaaataaaacaaaacatacacaaattcacaaatgtgactcaaaaatcatgatggcatatgtgacctctaggatcctaagaaatactattcaagtagagatgaggaacaacccataaccctttgagatcagccacacttagcttcattgttagaaggccagcattagaggtgatgagaagctcagtggcaaagcacttgttagacatgtaccataccttgggttcaaaccatagtacaatataagctaatgaattgactaattaagctgagtgcattgaagcggagctgagacacagacctgttctgaataaagtcaagttgcattaattacagatctgcaaaaagatagctaccatgtgcagtctcgcaggagtggattgcaatattggaaagggagtaagactcaggacagtgagaggcaggtcaggatttgttctgctcagccaagtctgccttatcggctcagttactccctcagctcactctgaatctcttcatctacccgttcataccctgccccagcatcctgcatacaccaaacacagcagaagaaaaaccatcaaaaaaccaccggaacatgttctggatctttatatttttctttaaacaggtaagtttaaaacaacaaattcaatttcttgtttatgtaaacctctttcttagaccaaattagaccatttgatattctaaactagcaaaaaaaaatctaagaataaaataaaaaagagttcaaagtgatttaagctaatgaaggaaaaaagcattaggcatatattttaatgaaatatttattgtaattggttgcattttcaaatttgactttacatttgaaaaacaacatagtcacataacagtgagcttaaacaaataccaccaggcttctaaaataaaactttcttataattaaaaccaatgaccacaaatccccatccatctcaactttttaaagcatggagggaacatgctaaaatgttaaaatgcctcaaatttaaaacaatacacaatcctcactttcatatccttttgccagacaagtctgcttcatcgtgcataatatacgcaagagataattaggctcaaatatctcagtaattagaaaactgtgtttcatctccctgattgcatgctagcctgatggactatacttgtcccttaagaattccttctaaaacgctggtccttcctaaatttttcatatttccccccccaactcagtgagaaaaactgaagctaaaattaaggtatcagaaactcctctgtaacttcaattccaagggtacaatgccctgtgctgtccaccattgccatcaggtgtgcatgtagtacacagatatgtaggcaggaaaaacagtcatacatttaaaaagtcttttaaaaaataagcaattattaagtgaaaatagttgtatatgaaatgccttaaacatctcatcagagatttcagcattctttcagtgggaaatattaaatattctaaatgaaaagaatgatatttttatggtgaggtttgtggcaagcacaaaggaattaaagattctttttgagagtcttttactattggttacagcaactgggctttgagggaatattattttgcaaataaagggctttctcctattcaatcttgtaatcactacaaaactcctaaggaggaggtgccattacctacgcatttaacagaggatatggcaggccagagtcacacattcattaagtggacaggcagaaaatgaacccaggaagcctggctccagtgtcaatctcctaacccatcctatggactacttgtaagctgtagtgtgttgaatacacatctacaatgttatttaacacactgtgcctcatttccccagggccttagtgttctgtgttgttatatacaattaatatggacacagaaaacataaccaaggaaaggatttttcaatttgttagcaaaaacaaaagcttggccagtaacagtcactgaatattctgctatacatattactaacttcagaaaaaaatagattcataaaaagaaaagtttcctcttttgatagtggtcagacaaataaaaaacaaggaaaagccagtgataaatctgatgactagtttttttgttttaatatggaaaagtaaaatgtgcagaacatgaatgactcagccagcatccattcactgaataaatagcagcataaacgtccgggttctgtgatcagtcattcaagcactctactctccccaggctctccagatcttagtgtggtattcatttttggacactttgagagagacaagacttgctttctggctttattcacaatttgttgattgttttagccctgtcaagatggatcacaccctgtgaaggaagatgtttccagttttcttcctacttttcattttttttttttttgaaatgacatgctacttaagcaactggctgattttccaaagacgtcccctaggagtttgaaacagaggtaatataaacagggtcttcttggtgggctaatctatggtacccagttttaaggaatcaaagtttcaatatgtgacccagcctttacaaaccaaaggttttctttctagtgccattgttttcagaaactgtatttagttttcaacaattccatttaaattccatattggaccaaacaattccattacatctgtgtccaacaataaccaagtctttcattgtttctattcctgaaggaatcttcaattctgctattccaatgcctcaaatagttcaatactttcttattcaataaacagaataaattgtctattgttcagaaatttgttttcaaaatattagaattaaaggttaactataataaaatgatcaaaatcctgtaagtttacttaaaatcggccacctatgtatctacctatgtgtctgtcatctatacatctatatcagatcagtgtggagaatattactagcatataatattcctattaatacttcctctccaaagtttcaatctgactcctattgctacaaattactatgtcacaggtaacatatatttgacataattatttactactgagtaattgcccaaactatttctatttttttgatttggtaaaataactacaaaaataaaaaaaataagacatcatacagctcaataattttctttaaaatttacaatgtgatagtaaaattatttaaaagactaaaacaaagatgtaaagtgtgatggtttgaaagaaaatggacctcctcatagtggcactactaggaggtgtggctttgttggagtaggtgtggcttgttggaggaaatatgtcactgtggaagcaggctttgaggtctcctatatgctcaaactatgctccatgtgatacatagttgcttctgctgcctgagaatcgagatgtagaactctaagctctttctttagcaccatgtctgcctgcatgccacgcactgtgacaataatgaactaaacatctgaaactgtaaatcccaattaaatgttttcctgtacaagagttgccatagtaatggtatctcttcacagcaatagaaaccctacgacacaagggtaacaaaatcacccaggaaacccatcaccttgtcaaatgttttggagacgttcatagtggtttccaatattacagccacagaaacatgttcataagggttagataaactaagttagagttcatcaattaaattttattgactttgtccatgacttttggctcaggggcagtggggataaggatatacacaccattaatatattttcatgtccataaatgtaactatccagtgcagattggatgggtacctatagcatgtaaattctaagccataaactttcttcaacctacttctttcttctcagtcattttcatttaagcaatatccatccccacttctagaacattcactgtacttagcttcacaaaagtgtatggtgaatattgactttgacttgtctctgaatatacaagtatccttggaaagctctgctggtaatgttactttctgagttgcaattgctcagccagcttgttgcaccttacctttagactctgaaggaaatgtatagaacacaaaagaagccatatcaaaatcctttgcaaaattcattcagaagtcttagaaaaccagtgtgagaacagaaagctagtgtgggattatatcaatttctccctcctagctcagtgtcattcctagcttaagtttagagcagcaatgaaactcaaatcacttctggaatgtcatatatataactcgcttctaacatctcaaactctaggcttttcttcattttctctactttgccctgaagaagtggagcatgcagctcagtgcttggcacaaggttagtactcactcaacaggcacagagaagattaatgccacatgggatcgttggttatcttcctgcttctatgaaattttcttatgtcactacaccgtgactaaatggcagtggaagacatgtgtctccttctctaagtgattccatcccaggacaaaagtccatctggggtgcttacatagtccacttctaaaatgctaaaaagaggaaggtactgaaaatgaagagtaagaaagcaaatgcatagtagcagtttctcagagcaggaacctaattcgcaagacatagtttttgcaagatcacatgttatgtacaaagggaagaactaggtgagtagccgtgcccacattaacatgaacaacagcaattagctttagtaaaactcccaacagacaaagaagatgattgactcatggctcctcaccgtcactagcatctctggaggatatgtctggagcatctggagagcacaaggcatgggtaacagcaggaagacagtgacctttcagtggtagaatgacagactctttgagaaacaacaaaatcaaaaacagttggggcctactgaggtggatctctgtcaacttgaggccaggtcagccagagctacctagtgagaccctgtcccaaataaataagtaaatgcatttattaactgaaaaataaggacagtagaatttgggaaaaggagatacaagaagagaaaatacaaaagcatgcagaatcacagaggtgacagggaagaggggaagggaaacagagagcctgataattctcactaaagttccacttgtgaatagaaaaagaattcagaaagaaaactaaaacatgcacatatacatctgaatcatatagacatgcctccaaagtgtttagaaaagggaatgggggaggggggatggtgaggaagttccagggtgtaggctgcataaatactgtggttgacagagaggaggagctaaaacaagagacctgggaagcacagtccacagcactaagcagaaacatcatctcagaagtgggcctggagtgtgcacagcacaatgccaccgagacagttttctcttcctgggactcagtcagggtgcaagacccaatccatttgaccaggcgcctatcttgctctgaggcattgggaatcaagagtccttgcattgctctcactacaggaacatatagcaaatgtccagtgctagcacactgatgcaaggagtgctagcttgaagctctggtctagctagaggggaagacagtgagtcagaatttctagggctagagatgtcgcctagtatactacatatatacatgcattacacattatagcatactataatatgcttgcctagtatatttggggccctggattcaactcccagccacatagacagaacatgttgtctggtgtaaacatgtaatctctgcacttcgaggtagaggtaagaggatcagaagttccaggtcatcctcagctacttagggagcaggagggcagactacagaatattctactgtaggaatcaagagtcacaaggacggattatctcttcttgtacctacttaagtcccttcctgcttgggatctccattagggaaactattaaggagagctctgagctccaggactgcagaacaaccagtgatgagaggttacgcataggagctaggtagtgggaggttggaccctggcaaggcgaggcccaccaaccttcagactctgcctccctaggattgggctggtccatctgcctgtgcatttctccacccacaaaccagacactctaagacactggagatttggatcagctggtagaaagcttggagcttgtcccaagggttcctgaccagcagaaaggcaatcagtgttggctcagcccataaagcacaccctctggctgctagacaagcacctcaactgaaagccaaggaccaaagagtgcagacagagtttcccaccagggactgagctggagagagacctaaaggaaaaggtagcaagtagtgacataagtcactgcagtgcagggtacctctcagagagctggaagactgcctcatttgttccatcattacctgcttgcatggcattccttctctcttttcatagttaattggttcatacattgttagcctattgcaaatccaccccaacgctgcttctttcctgtggttctgggtgttaaaaaccagagccttgcacatgcttggcgaacatcacaccaagctacattcacggccctccttttccttcatggcttcctcatctgtcttctcattttcacatctaatttctttgttttttctcattctgttctagcttagttttgattttgtttttcctttttgactcataaagaggtccaggcagggctctggcttcggattccacctcggtattccaagtgctatgattatgtgagcaccacacccgctttcaaaatgtaagttttgatccttatttcccactcctttctcccttgtctctttgcttttttttttaaatcaatcagacctgtcttacattgttttctctttcttatcattttaagcttttgttttcttatcattgagtctttgtatctctgatcccttatttccctttaatcattttctgttccttttctatgtttctttttatgaaaatataacaaaatctattatcttacatttgcaatttttttaaatgtgtaacctttttttttaaattggtgacaattgttctgattacacttgtgagttatttggtaataaatagccaacaaagtcatccaggattctaatttttatcaagccataactgttatctagcttggggctggaaagatggtccagtggttaagaacactagctggccttccagaggtcctaagttcagtccccagcaaccacatgatggctcacatccatctataatgagatctggtactctcttctggtctgcaggggtacatgcagacagaagactgtatacataataagtaaatcttaaaaaagatgttatctatatcaactctctgttttattttttaagataagagatagaacatttgcctaaggacccaagattaaaaatcccttgataactttctcagtgcataaaataaaatcatattcctttttgtccttgggtactggtagtaaacatgatagtggacttgttaaagccatggatacacattctcatgaacacttagtctcaaagtagtcagcaaaaggaagagagcacccccaaaccaagaccacactgaagtttatgtccctcgtagatacaaaaacacacgagtggaaaagcaaaagctgacatcaacgaaggggtcttgcgaaataacaaaagaattactgtcgctacaactttagctttatccttgatcactattttatcctagacaaaatagcctgggtgaaatatttgtttatcatttattgcactacatcaaacttcttccttgttcatttctcgtgtgtgtgtgtgtgtgtgtgtgtgtgtgtgtgtgtgtgtgtgtgtgtgtgtgtgtgttatgcatgcatgctcatgtgaaccctgtgggtaggccagagaaaccttgggtaaagctccctgaccatcattttattttttcaacagggtctctcattttccttcatctttctaggtgtctgaggccagctggccaacctgccctagatctgcctgcctacatgcttccagctctggttaccatactcaacctttgatgagggtgctggcaatgaagtccaggtccatgtgcttttttgttgttgctttttggttttggttttgttttgatttttggcacagggtttctctgtgtaactaccaggatggcctcaaactcacagagatctgcctgactctgcctcctgagtgctgggattaaacgcacgtgccaccaacacccagcggtttgtatgcttttgaggcaagtgttttcattactgaatcatcgtcctgaccgttcctccactttcatcattttccacttttgaacaacccaaaatctagactaaagcagaggtgggaaagaaaataacttaagtctgtatctccggcttgctagcagcaggactggagaaataaacaacatgctgtggacaagacaatgtgccatcctcggaaggacaacagagggcaaaggagcctgtccttgtcagattggatgtgaacttctaactacaactaatcagagaggacgtcgacactcttatattctatgtcctagaaactgcagaaagcaccttatgtatcttttaaagcagacaccacatgactatcgttaagcagaacagtatggcaagcgggacaatatatctttgtggcagaaaaaaaaaaaaaaagacatgcaactggaagtggatttgggcttaaagagatgcaaaccagcacctgtgcagacaaggctgggggcactcacccttccagagcctgcttccctttcttctacaatggatttccccttttctggaagatcgctacacccttgatatcttctccaactgaagttctgccccgtgtggaccatttccttggcccttctcacccttttctcctcatttcagaggtcaccgggaagaagggaagaatcatggcgagggtagggggatcagagtcacctgaggaggttgttaatgcaaaaaattcaatagttggtttaatttcttctgctgttttttttttttcttctgtctttcttcttccctagaaaaactacctcatgccctgtgctgaagggaacactaattagaatgggcaaagggaatgaagttgagttaaaaagactacaagccaaagaattcaggagaaaaaaaactcatgtcctgtagtaattctacacacacacacacacccctttttccagatggacggcatgacccagcatgtaaggcagctctgaaatacacaggctgtagcctcccatggttattaccaatggttagtacagaacccctttccaaggagaacaactggacagcccaaggttagaaggtcaatgtgcagggtctgagatctgcctcttgcttctgtttctctttatgaaaatataaaaagggaggaaatattggtctggttgtctctctaattagtggtaataagagtcaattctacttgtggtaaaactgcttccaggacttttttcaaatgtcacctttactctaaaccttagcatatgtcctcatagtaatgacactcctttcaaatgacttctttggtgaataataataataataataataataataataataacaataataataatcttagaaagaaatatgcttccacgaggaaggttaaagggtagatagatggaggaatagtttctaataatgtcagttgatgaagttcttgttaaaactgatgagtgaataaaaagtacgagcaagtcataaaccagcagaaatgtacaacattttgcaaatatagtgttgctgtaaacactggagaaagtaagtaaatgagcgaaacatcaaaactgagtaagatgagtgggaaagatactgaccccaatgatagattcagtactctgtggtccagcaaagaaaaatacagcagaatcttgtaagggagaagtggtctggtgattaaaacagggcagtggtatcgtgaggcaacctcaggaatcaccaacaagatggatcaagaaagaaggctggtataataaaaaacaaactccttgctatttggaaagagtcatgtcagctattccttctagaatcttccacatagtacaagttgccctataggaaatgctaattatgtgtcaatatgaaataacaacagaagcaatcaagatgctcagaaatctgaaattttaagcctaggtaagacagttacacccattcctcttagaaatactggtgtgggtgtaaaaggttgtaattatatataaaatactttaagtaggtttttaacttcagtgtttcaatttcaaaccaggaaggtgaatgagcaagcaaaagatatggaaatgttaagatatacattgtaattacagaatataagtaaaattattatttcctgcaaagaggaagccatgtgcaacaagggtccaaagagcaaactgagcaatagagacacctgaattcgggatatacctcagaatgtttcaaataggaggactttctagaaaagtgtcaaacttggaaggatgataaagaccagatagaggcccaggaggacttactcacaatcacttgttctggtccaagacaactttcaaacagtcatgtatgtaacaccaaagaacattgccaatcatacaatttcctctaacctcctgaccctagcagttgtttccttcctctttcacattatggcaccaaatgctgtaattaaactgaagccaacaaaaaattgtaacaacaatttatttctacaatgatcatactttaaaatagtactgagtttcattcacacgtaatagaatagtagaaagacatatgtctgttctaaaaagcaaagaatttgttttggtttcctatatagcagtactgcattctttctggaagattcaatacaagattcaaggacacaaccaggggaggaagtttcactgtctggttagtaacagataacctccatgtctgacatcttctttgtgtgtggcagcctaagtaatctggcattgttgaaataggaaaatttttacttaaaacaaaacaaatcccccaaaacataacaagcaacacaacagaacaagcagctgttctgacatctgcagaataatgtaacacaactttaaaaacaagctactctgtctttcctagccagttgaaagagtaggtgctccctcaaagccaatggtcacaaaggcctctgccaatcaagcctttattttttctttaaggttgatcatgtaaggaacaccaactccaggtgactttgccctgagattctggcatccagggctgcctgggggacatgttggctgtttttagcaaaagaaaagcagtaggagagattccatcccaattatgggtaataggggttgtctatacatgggcataacttcagagagcaggaaccaaggctaaagacaaagagcaatagagaatgcatattgttctatcagagctagaaaatttggagatcagaaagagtgagagaaaaagagccagagatgagaacaatgacagccagggcaaacaatactgggcctatcaatgaggagatgggcagccaaactagccaagggttcttataccataaactttataccataaacttttgggggaaaaatcccaccttctcctggcccacagcagtggcctcaagtcattttggaaagattccactgagccaggagcctattggtggctctggaacccaggaattctaccacacagagtgtgctctgagaacccaggggaagtttcaggtgagagcaagtctgtaggatctctttagttagagcagaaaacttaagtcagaaccgtggagagctccaagtagagccactctggcagagctatatgctaggatgcttcctcctcccaaaggcaagcatggtaacctactcttagaggaggcatgggcagaggcaagaggtgtgggaggagagatgtgtgggaacaaaggggcatacataggtctagagcccaaaaggagtcaggcaccagtgtttacagcccaaaagattaccagactctagagacgaaaagactatagtcaatccctgattcttaaactgtcagtcacaacctcatatggggattgtaaaaggcaataataacccacccatcacacttgcgtaatcctatttaaactcaatgggtcatgtacataaaagacacaaaagaaggaagggttggggagaagggtttcagtgtgtgagaaggggtggggatgagacaggacaatgggggtgagaaagggaggaaaaggagagaggctgggaaggagacaagaggaaatagtccagagaaatcgaagtggggaggtatgacaaaatttatgcacaaaaaaaactttttaaaaagaaaagaactgccgaccataaaaggtgtctggatgcccactgatccaaacttaatgaaaaaccacaggcaccatgaatctgaggcattttcggcaggcagaggctgcccatgttgagtctgatgacattaaggcagcctcagttctgagtactcatgcactctaacatacagtgctgatgctgcctcaggtcagatttgaggttatttttaccaagtgtgtgacattctttccttgtatactaacatgacatttcaccatggaacacatttttcctactgccattctttagcatgtaagtatcaaattaatgcatcattggactgtagcatcttaaaagagtttgcttttaaattcctgtttgaattgctgttaagtttcatagaaattttgccttggggctaagatagaatttataacaatttctgaaatggccctaagtcaccttcttttattttataatatatatgaggcagcactctcaacattgattttaagagcaaaatatgagtcaattctaaaaaatattgaagatgctctctgtcttgcaatatcaaatatttaaccagaatttaattctttgtgtacaaataaacaaaaataatcaaccatctcattagtataccaatttattgtttaatggtaaaaattgatatataccaaaaattgcttcaataaatttctttataatttatcatcaataaatgctagatttgtatatatgtgctttatatacctatgtatctagggctacactaaaaagaagatgtcttgggcagcaagagattggttaagagttagttaagaagtcaaagaagctttgacctagagtcaaaaccacacagccttgttgctacagacaaaacaaaaatcagcacaggaggccaaataacacaaaaggttccatttcaccacaaggaacctactcaaaaaaatcaagatatttacactcacccagggaatgacaaccctgagtgatgggagccagtttctctcatgttttgtttttccatattctgtttctgctatttaagccattttagcttttcttcctcctttattttacatctagcttcttggtcccctccatgaccttggttctcccatctctccctctccctctttccctcctagccctagcacagggcataggctggctgaggttccagatctccacaccaaagcctctcaaatgtggagactgcagatgtaaactacttacttagcatttgttggttttgttggtttttctaacattcccgtcttcctccttctgcattcttctcccccacctccgacacttgactgtattatgatcttcaaattgacacattttccaccccacttcactcttctcttctttcttatcttatgctatctacccccacccttgctctgatactatttgctagttttcctctgattattttctttccatccttacccttgggtaagtcatatctcacagtgcactatactgtgctcaatcttactgtcctatgaagttactaaagttaagggggggtagctgttttgaagtgacaattattctctttgcactggccttatccatcacttgtggttccttcttccataatcagttattagccttctaccctgaacgtggtgctgggcatcatgccccagaccctgggctgagtgtttcaggatatgtcaagctactgagtgacatccatagtctactagggagaaactacactccatctttaccacaaccgagcccaacttggacactataaatatttaaaggaaataatatggatgtctgaaaaataccaaccaatgacctggtctcaaatttgcgagtctcaacgcaaaaatacataagaaacatgatagatgtgcaaatcttaacacagaaaacacaagaaaaacaatatcagggtagcatgattcctccaaaaataaacaaactcacagtaatggatttcagtaagatatatatatatatatatatatatatatatatatatattgcaacaatgttcaatgaaatcaaaggggacttgaactaaatggattaattcaaagaaaatataaagaaactgcttaacaagaaagaaggcaatttggaatatgaaagtttaatccaatagggaggagtactataaaaaaaatcaaatcaaaatttgaaaatggaaaactcaaacaacaataagaaaattctaaaaacccaataatgaacttgaccagtttagtagaccaagtaaaagacagaatgctacagcttgaaggttagatgggtgaactggaaaactcaaacagtgagtgtcttaaagaaactatatacatcaataagaacttgaaagtcatgtctttaaacactgaaacattttctagtttatgtcaaaatgatttagagtttgtaaaactctgcccattgctttcagtatcccttcccacagacaaaaggtgggtactatcaaaactgtgattaaatgagtcaaagaaaaaataaaatcctcatttgctctgcaattattcaaaagcctgctgctgtccttggtaaagaaagatacactgctattatcaacagggcaccaactggaactccaggtccaatttctcaaaattcagttctcacactcaggtctaagaagacaatcctgagcatgagagagatgagcaggaagcttgtggggccagaggaagcaggtgagaatgtctatattcatctccctaaaagtctcagcagcagcacacaggaagggcctactttagtgtggtttaaaatgagcttcaaggggctggagagatggctcaaaggtaagagcagtggctgcttttccagagtcctgagttcaatccccagcaaccacatggtggctaacaagcatctgtaatgaggtctggtgccctcttctgatgtgcaggcatacatgcagacagagaactgtatacataatcaataaatcttgaaaaactaaaatgagccattccttagtcccctctgcctatctaaacaaaataagctcttcaaagccctcttaaggttgcatcttatccacacactctgtccaaatcctgaccaccaacagtacttaccagcttcagtatacaccatataacctgaaagactcaaatgtagggacttgaactgcttagtaactgtctctagaaatctctctgtcttcaagcattttgaggggtttaactgtttcatgtatttttgagacagtgtctcctatagcccaggctagcctcaaacttgctatgtagcttaagataacgtaaaccccaactgcctctgcatctatctccaagtattgggatcactgaggtgaagcaccagatccaacctctctggcatacttggtttcttctctctgttatgcttcatgctaaaatagagagactttgctgccttcaaggtaaagggcaaaaaaagatgcaattgtgaaagttaaagtgtcattgttatcaccaaggttcaccagtgagactgagggcaaatcccaccctgtgtttactagggctctgtgcaacagtaactctactctaaactagtagtgaaagagagaatttctcatcacctgtccccaaagcctagcactgatgttctattctgaactcttaataatcctcacggctgctccataaggataaacagatgttaaccattaaaatccagtgtccttttgttatctatctagtctgccacaacagtaatgctatcacagtattatggttataaatccaaaagaattacccttgagcatgattaaaggttatacaagtaaggtacactttatcaaatataattcacccaatgtaaaatgtagcaaggttaaggatcattagctaattgcgctttctttttattacactgctgatttttcattttcgacatttacttagaagtatataaacatttttttggcctaaagaaaacaaaactagaggttagtattgtttgattcattgaattgattgggtatgctgcacacatagttataggaacagcatattcaaaaagtaataaatctttcaacatctaaaacaaatccagattccacaaaacctatgtttgtctaattatagctttctgttttgatgtggtttcctatgtaaatacattctaaggcctgcagctggaatgcattatattaaaaacacatgttagaagttacaaagtaccacaggctggggaaatggttcagcagctatgagtacttgctgcttgtgcaaaggacctgagatcagttcccagcacccttttggggtagctcacaattgctccaagtaatctgacaccctcatctggtctctgtgaatcttacacacacacacacacacacacacacacacacacacacacacacaaagcatatactacacacatacacataaataaaaacaaatcttaaaagttacaaagtaccaagtatttataatggacctccaaagcaaatctaaatggtcacactaaaggatatttgtaaaaaaccattttaggttttcagtctataagccaaatgtttcaaaaacaccaacctgctcatactcggattatcattgaactacaacccatgaggtactgccaatcaccaattacagtgaatgggatttgaaaatataaaaatggatgcttactgagatacaaagataaacgaggggctagagagaggctcagagtttaagagcactgactgatcttccagaggtcctgagttcaattcccagcaaccacatggtggctcacaaccatctataatgagaactggtcccctcttccagcctgcaggcatacatgcaggcagaacattgtacacataataaataaaatctttattaaaaaaaagataaacgagacacccttgtatacttttcgtagcagtattagtgtcagacagtttgaagagagaggacacacatctgccaaattcctcagcacagcaggaagcagtattttgagggcaattgccatttgagacagcatctcttaggggttcttattaggtgctcccacacagggtcagtggaaggtggatgcatctttgtctgtcattactgagtgtttgcaacataaaattttcagagtttagacattaatgtacaattgcaagatagaatagaagaccaattatccattccaatatcaaaattgtactaaatatgaattttaacaagtatattcactgtctccccttattataactagtatatttttccatttttctaaccacatttccaaaggctgaaacccaggctgtatacagccttcgtgaatagtttttctccttaactgggagaacactttaatctcccaaagagaagaaatccatgataagagttatcaaaataagtgtttacacagataccagccaaatatgtagaaaagcacacagattcttctaattcactggttgccctctgtgtacatttacactgtgggcagtatgctcccttacactcctcctgagcctgattagatgctatctgttgaaggtatactttagagaggcttttatgtgttgtagggtaaataaaaacacatcacctaaccactgatgaagttaaccacagtcgctttctgcctccattgactatttgtgtgccacaaactgtcttcctttgcagttcttacagatgcttatgtgcctagagtagtgtatcatcaatcagatacatttttatttaactaagaaaacgtccatgctacatggcatcatagtttgtgaacttgtcaaagtctgttagaatatgaaaaaggttgttaaaagtgattctatatacaattttatgtctaattacagttcattaaatatttaacgtagaagaagaatgaaagagtttggatgagactccatttatattcaaaggagatattatgcatccatatttatcatttaattaggaagaacaaagattctggaggaaaaaaatgccccaagttggaactgtacagtaccctgaggaagctggaaacagcatagactcctaatgcagcacttctctgtaccataagctaatgcctttctgtctcacagagtgggtgaattaaatgagattatggaagacaagtgttgagagcagcaagggcacatgagaaacagctgatcccagtgtaacttgtagctagggtggccattgctctctagcagctatttcatgtttctcaaaaaacatatttcctactgatttcactggatacagaataaactaaaagcttcttgcatattttattaccaaaaactttctgaattaaattctcttacattcctgatcctaaatattgaatttaatctttatttagcaatgtagggttactgtttatattaatatatcattgatcaccatcacagtagggaagagggcatgttttctggctcgaaaacattcagagtctaagaggctcaaacacaggcaccagacgagttgttgtttctagggttgcttctattcgtaagagataaggttgttattatttcgagttagattaatatacaattttgatgtcatgtcgcactcatttacttatcagaaagtctcttaggttgtcatctaatcaactcgtctcaccttctcagctaacttcctgatgtgcattactttaaaacaaagataagtaaagaacgcagccagaacaaagatgaacatgtgtttcatgagtgaaatacaaaatactgtattttcaggattttatttttttattttgcaaagaggatttagaaatgcaacataagaatcaatatttgacttgctatctggagaatcatcctcctttgcaatatgccaaagggcagtacgcccagcaaagaaccttctactgtcacacaggacatgcccccactatgaccacgtaaacatcccaaggactctgctaaacacaagttcttttcaccagaagctcccttgcaagaagacagatcactggaaaatcattttgtgatttttaaatatttaaaaaaagcagaacttctactttccattgtatataagaattacttcttgatatgccttcataaatgtagaccttagcattaaaagcttttaattctacttggaatgaatcatgagatagcaaatgtcttcacataccacaagaatatatttttcataaaagagattgtccccacacaaatcctgaaaatatactttccttaaacaaaattcaaaatttcttaaggaaatgggataaagacatttttcttccaaaagccttcaagttaaattagttttttttttctataatatgtcactttgtagcagattttcccccacaaaacaaaaagaattcttatcttcttaaacatcaatctgaactcagttctaataccaggtcaaatggacactgcaacacttatgaggagtcaggatggggagactctttcagaaagctcctttgaaactaaagaccaacagctgggtcacaatggatgtgaattaggatactagcaaagttccttaccgagagttcacaaaatgtcttggtgatgataaagctggagtggcactcaacacagatgcagcatttgcatgcaaagaggccatctcatgccaacaattttaatttgaagttttgtagagacataagtcatgtttcagtaagccagaaatggaacactatatatcaaacacagaagttctacaacgccaggcaacatatgagctatctttcttatctgaatccctttaatgaagcttttggtactgggagatgcagagggaatggtttgtttagctgagtttccagtctctgtagaagagacttcccttgctatagccaagcccctgtttggctactcagctctcctccatattctgcactctctgctccaattttgcatggcccactttccatctctggcatggtccatgagaatagataagatggattcagcctcatagtgctctatacaaatgtatcctgggaagaaaatgtagatccttccattacctcagaggtgtcaccttggattgattattgtgacaaatgctttcctggattttaatctgttaaggatatccaaggacatttataagtctttctccatcaaccagctgttaatttaatatataccttttgatatttggcaagtatttatgtagtgtcttatttactacagattgacctgtggctaccagaatcttctagaatataacaaatattcctaaaatttctggaaacattcaacattttgtctaggtttgtatccttacaaaatgcctaagattagcccagacacacagtcagttattgattctaggagtctggctgtccctttctactctatcctggatggatttggcagtgtccaatgtggaagtgttgtctgctctgaaatatcaatagaagcaatgcagtcccatatacttggttgcaacttgcattcaggtgcagaaagacaaggactcaaccttgactcaacccttggttgagtcccactgatattgggactgagttagaagaacactgggacactggcctcatttcttcccactggaactgacctcttccccagtctcttctgccaccccactgcaaagttacaaaatgtaaatattcccctattccatgttgaaggattggcatcaatagcaaatatctacagctcactaccatggagtcttgtcatatattgctgaatggcatactggagtgtcatttcatgaccgagtccagtgggtctacccattcaaaacgttcagaaatgtgtttcttcagacacctgtttttcttcttctgattcatgtcacagactaaatcaaaggagccaccgtgaaatagaaacactaaaggggacaggatattcttccataatttaagtcctgtacagctgggttttaatggcagtcacttaagctatactgccaagagctagacttactccttgtttgcctcttaccatgcatgttaacacccagatgaacttaagtcaagaaaaacaacactgacagagaagaagcaatggtggaggttttggaaataggtgctagtgaataaaataatctgggcactcactctctctggacagttttagctgttcttcctaagtgaatcttacttaataatacattctaaactttcactccttctttactactatctgtagaaaggtccagggagacacacctactccataaaccatttcagtttgtcttctaatgaaagttcacactttagcagatggcccctccaatttgaaagtacagaaatactcacttgtttagcctttgtctttgagattgtatcagaaatgggtttctttctttcctttaccgcagttttagaaaataattcttcaaattcatgacaatctatggatggctcttcaattttttcccaaataagtgaagggcttgagtctctaaaattaagcaaaagaacaataaacgggccatccaaagtcctatagcacaatgagtaaaaacagagaggaggaagaaaaggggggagggaaatgcaagaagataggaagaaaatgttttcttaacttgattaaaaagttaaaatgtcatctatacgaataagacatttgtccagcaattattttccaaaactcttcattatcaagtcattccatgaaaacatgaaagcaaagcctatctcagaattgttgagagaagcaaggaatgcttgatttcttacaccccaattccatttagcctagtccattatttgagcgttaaaactaaacaaaacaaaaacaaaaaaacaaacaaaaaattgtatctctgaggccaggtaaagtagcatacacctttaatcccagctaaaaaggcagaggcaggtgaatctctccatgaatccatggccatcttgggctgcacagaaaattctagaccaaaccaggaccgcatagtgagttcctacctcaaaaattaattgattgattaattaatgcatacataatatatgtatatgcctacatgtatgtatatacatatatatttgtatgtgtctgtatgtatgtacacatgtatgtatatgtgtacatttctagagctggagagatggctcagaagttgagcattcttactgttctcccagataatctgagctcagttcccagcacccacatgaagcaagtatcaaccatctggatctctagccccagcagttctagcaccctcttgtagcctccaagtgtccctacacatgtgtactatatatacatacatgtaaataaagaataaaaaaatcaatctttataaagtatatatatatatgtatatatatatatatatgtagtatatgtatttatatactctctacacattgccacccaagtgcctgctgtcatttttcttctcaatacctacatgtttgtgcagtgccaccaagaatgagcaaatgtcatttataaaaagcaaaataatgaaacagaacatcatatcctggacctggagagaatgagtttgactagagtttagaatgattcatcaatgtatggaagtggtaagacactcgggccgaaacgacaatggactggaaagcagagccagggatctcagcatatcctcttctggatggacttaaagaagagaaaatcaatgtaagaagtgcaagggaatgctattcctaaatgcacgtcatttcgtccaaatacatcaaagaattatgatcaatcagaataaaaaagagtcaatggcatttaaactgggtgtttttacaccttcccccacccccacccccagtatttaatagggaagcctcacactgtctccttgagactgaggatccgattgtgtgaggacttgaacacttagtggaaaagtcttagttcatgatggtcattgccaatcttgaccacgtgacttcccttgtttctctagaagtgccagagcattctcaaagttacttaacacacatagtttggatatgttttgatgtaacatgtttctttagaaagagttcttatgaataacacagaatcataatgcaaatttgtacctcttaaatgtacagaactcatcctggagagatggtttgcctatggattcgacttacatgtaagaagtgcattgggcagaaatagacatttaaatagtcaaagcaaaggatagaaactaattgtgcaacaagtgtgcctgcctctctgctctggctgcttttgcagagaaaccttgctctagatggtttgagtgtagagggtgtcatcctccaactatgggcaaaagagcttatgctaagataaacagatcccaagcttaaaaaaattaacactataaatggatataatgcacacctcagtcagagatgcacacatgttgttttctttttttttttttaatcttccatactatgggagaaaagtctgcaatgttaaatagattgcttcaggagacactggaagtcaacatcttacaaaagttttataggtgtacttaaaatccattaaattctactttccccacaaagttctacatttagggataagctgctctggggttaccttttactatggagttgaattcttgtccaatagagaggcttcattggccggcaaggctcaattggctgcttcctagcccctctttcctgattcatacccaatccaaatatgccagttggcaatggaggaaaaagaaatccacacactggtggtgctggtaaagtgctactcccagcttgggaagagagtgaaggccctgagccaggcaatagagggggtggagggatgcctgccccagggggaggtggggctggaggagcccccatacctggtaaaggaggaggtggaggaatagcaactccagggagaggagggggagggggtatgcccactccagggagaggagggggagggggtatgcccactccagggagaggagggggagggggtatgcccactccagggagaggagggggagggggtatgcccactccagggagaggagggggagggggtatgcccactccagggagaggagggggagggggtatgcccactccagggagaggagggggagggggtatgcccactccagggagaggagggggagggggtatgcccactccagggagaggagggggaggaggggggagtcccagtccagggagaggaggaggtgggggaggggctggcagcatttctgttccctgtagactggtaggttgtggggctgttgtactgggcagagcaggcactgttacgtcagagagacagggaggtgggggtattgccatgcccaggtcaggcatgaggctggaggactctgtacaaggcagaggtggtgcaggtgggacattacagctgttttcgaaggaggagaaaacagaatgttcggggctggtttccaactcaggatgcagggaaggacaggagggctgtccttgaccatcaggaggtggctggagttgtgatgcactctgcagggctggttgggcatcaagctgtactgatattctccttggagacacaatcaaagaaatttctgaacagaattttgtctgaggtccagcgggtgaggctagagcagctgactctccactctgagctgcaggtgggcatgggggacctcctggcagtgcctttagtggtgccagtgtcaggatgccaccctcttctgtaggggaagtttgtatcgacttggcctcaagagttctcggaggctgtgcaaccctcccatgcaatctgagagcatccagaccaacttcttcagaggctgtgaatccattctcaaggcctggaagaccccttggcccctccaagtctagggctggatattgcttttctagctcagctatttttgtcctcaggtcctcaatggtctgttccagttgctggattacagttgcctgcccttcagacttcacatcgaaaacttcctgagagacaaggacaggtacagttagtaagaaagtgaaaaaaaaatccaaatatctaaagaagaatgggaaattcgacaaagtcacactgggagtgtgtctccagacagatcctgtcatagacagagtctactgaaatttctatgtggaccctcttttccacccttggatttttaaagtagttcacacatcccccaatcaaatcctaaggtccttgtttgtcttatcttcatacaatgtcattgaggatgagcagcatgttatggtcagctgtaaatgaaacttgtcacaacctagaattgctgggatgagaccgttaatgagaaattatccatatcaagttagcctgtaggtatgtctgtgggggctgccctaattaccttcattgaggtaggatgcaaatacccaccctgactgggccctgaactgcacataagtgaagaaagctggctgagcagaagcaggcggcacagaatcatccattcatgtttctcttgactggggatatgtcctgtctagctgctttgtgttactgccttgacatgtgtgtcagtgatgaactgcaacccttggctaaaagcaagttatcactataacagaaataaaactagaatagtacccaacaactgggaaaaacattcttcaagacaaatgtttgccttcctaactgtgaactgatgctattaggatgttttctagagactttgcaagcaattctgatttttaaaggcaatcactaacttttaaaagtagtcaaagcctccagtaagaatatgtgaagtatggttgacaaaataaaactatgggggtgtacacaatgagtgtgtctcataatcctgatgtcacactcactacaaagttaaatattttactcaaagcatttcgataggtaatcactgatggctctccggaagtcacggacactttaaatgggcaaaattttgagggctgcatatgttgtatgtaaacttaggcacacacacaaacccttacatcatcagctttcaacaacattcacacaaaagaccaaagtattaacatataaaagtggtgtcatatattttaaatagtccatgacaaaagaaatctctcctatagacagttctgtttcccacctgatgaatatgaccattcccacacaataattatgatgctactgagcataagtaaccaaaatacaaaactctaccactcaagctcaatttaacaagtctttattgttcatctttttcttgtgatactggattacttagatgtgtagattatctccatcttcttggcacactggtaaaagtgacttctaaatattgatctgtatttctcaagttatcttggtgtagtaagagttctaatttttccaccaatgatcaaaacaaaacaaaacaaaacaaaacaaaacaaaaaaggttcctttggagccagtgagatggctcagcaagtaaaggcacttatcatcgaatgtgacaacctgagtttaatcaccagaacccacaggctagaacgggggaacctactcctgatagttgtcctctgccctccacactgtgattcccatgtgcccacatatataaaacaaaaaaagaaatgagaaagtgaaagtgtaagttcattgatgaatgaaatgcaagaagtaaattacagaagagacttcccaaacccagttcttaaatcatattaactaagctgatccattttcatcaccaatttaaatatgataaaaactagtataaaattagaggacatctagaaagataaagtgaaaagagaaaatgactatgtaggagttatagtagcaacaacaggagatatttggagatttaaaaattctaaattacaaagctaatcagcaaaaggtaaacaaacagtcatattgcacatggtaactggtataagacaaagactgctgtaagggttcacctggtatcaaaacatcatgattattccaaaatagcattcaccaaccagccttccctcaatagtttcccagcactctgtaaatagacagggacactggagtggtatgtggagcctaaggactgggccctagtgccaggaatgtccctgacattgatattagtgtgaaataaaccaggtgtgctctgacttggatgaagccacttttgacttcaccaacatatacagctttacttctgtaatcgagggaatttgttgctctcgctgttgcccaggcccacacttctgagtgagtatctaataaattgtgatcctcaagctgtctcctccttcaatgccacagcatcctggggccagctttcacactgggactggactgctcagaatactctacacaatgttttaactattggctcacccaatcaattggcttccttctgattaccaattcccttgtagctagggctaacctattagatgaagtcacgggatatttagaagttaaaaatggtgagagccatcctgagtatggggataggaaaatttggtttctctggaacaagattacaatttacactctaatttgtgactgtcactccaaaggtttcaaatttccactctaatttgtgactgtcactccaaaggtttcaaatttccaggtaggttaagaatcattttcatcttcgagggacagccttcaaactttcccattgagccattaaaacatcttattaagctgcaatatatcttatgttcacttcattcagcaacaaaacccaactggtagaaaatataccaatgtttcagatttagttgtgtgcattgggggagggatctgttccaaaagagcaacatttaaaagctaagggaccacatcatttacttgtttggggctgcggctcagtggtagactccatgccaggcatgcataaagccttaccataacaggaagttatataaattttatatttaaacctattttctagtaaaaacttctgggtaaatacatgatcctacactacatgattcaaatgttccatcttcatgttccctgatgctaagaaatgctacagtttctgaaagatgggcaatttccctcaagttgcatttgtattgtgtggcttaaaacgtgagatcattgataagctaatcctggcaaaggtcatattctagttatttataattacagtttagagcatgggatagtgaggggtgctgtgtgaaaaagggggaagacttaaggctgagccaaatactgtattaaattcactcatttatttatttggtgatactaagcattgaacctaggacctcctgaatgctataccactgagatataccattaacccttgcttgatcgacttgtcttccattttgaggcagggtctggctatgcttcacagatggacttctaatttcctctgcaatccagatagtctttgaatttgtaattcccctgcttcagcctttgagtagctgagattacaggcttgtaacaccagacctacctatacatatttattttactaatatgtgttacatttttatgtcttttattcatttttaaataaagcgataactaaaacacttaaataataaagaagttgagaaaataaggaactgataatatagaaatatacacattttccaagcttcaaagattttcaagtatgtaacacagtaagaaacagaactaagatatggcagagaaaagagtggtaggagaataaaattccaaaactaaatctataacaaacatgataattagctgcatggtgccaggcagtgcagacttaaggaattcttgaaggtattaataaatcacactacaaagacaagagccagaatttttttacagataactttttattatacagaaaaattttagacaaagaaaaagaaaagtaggtagggatgagagacttgcctacttcttgcattgtttctactttaaaaaaaaaaaaaaatttcccagaatttgcattccctttttgacaatctttacctctctccatgaagtagtagaagtaacagtctctgttttccatccaggaagcagagtaattaagctcatctcaaaccttaactgactaccttgtaagagccatctaggcgccattgtagagtagccaaatgtatataagattttcagatctcaacttagctgaatcatcaaagaatcttatctggccttccttatccatgactatcagtcaaggactggctcttgctgagtattggcagcatccatgacaacagttcctgttgtgttcttagagagggcagcattgcttgtcaacagttaacagttgatttctctatgggttaccttttttttttttttttaaggaatttatatggtaaatagaggtcattatcaacaaaaagtgcaggctatcttctggccatgtaagcaaacattctatgctcaagacccacatgaagtgaagatctgcggggcccacccactgacaaaaccacaatgtaatctctaaaagactgccaggcactctgtggtccaggaaaagccctcaagtaaggagcctgttcccctgtggccagtgcctggaacttaatcttccttctctcagggtactagaggatatatccgattctccagggacttgacattggagaaatgcatcttcgttatcttagacttctttacaaatatgctctcagcgtttccagaattgtgcaacagtttatccaatgctcgtggcaatggctatcaagaaattacatcactcgttacgaggaagggcaaagtatagttgtggcagttttataaagaatcaatagagcaactatatccttgtaaacagttgaagataaacctgacttaaaactcataaaaagcaatgcatttacatatgacaaatactgagaattatctatctttaaaaatattgtttcaaatcccaaatcattaagagcagtagaagccgtcctcctatttggcctaacaattctatacaatcacatagccaaattttttctcttcctgtataatcttatacatgggtggtgatggttagttcctataaattgtttgaacacttgaatatcacaaaatacaaaatgccattgaaagaataaaatgttcatcaaaaacatgttcccaagtgcaagattatctgattcccagaaaagaacccattacagtaacactaaggttacaactgtcaaaaaagaagccaagatacactcaagcgagctcttgctgaaaagctaatgggctcatctttaaaactttattacattatgaaagcgaggtgctttcagagcctggaatataaaaactgctcactggtaagttaatactagattgatttaaaaaaaaaatgttgatatgagacatgaattcattgccaacctcactcagatttgcaagttctgttgactttaagcaacttcactggcaaatggggacactacacacatctacacaagaggaagcttactatccagtgaaaagataaattctatctctcatgttttgaattctaaagcaccctagggttctggagcaagccagtggcattccagatctacaataacctaatgtatgctagaccagatcccacagaaagtaaatccagactttaaacaggtagaattgcttacaaaaaataaacacaaacaatttcaaatcttaggggaactttgaaggaaaggggaaaagcttggacatgtgagaaattgtaaaaacttatctagggtttttaaaagtcaatcttattacagaaaacaagagcttcacagagttcaaacatctgtgggggtggagggaggtgcttatagagctcatagcagaatactggatgttttcctctattattctcacgtgaaaaaagatctctcaatgaacctggagcacaccattttttatagctagactggtgggcttcaagccccagccatcaacctctctctgcccaccacatagtactggggttatgggtagatactgccagccacagacagctttttatgtcattgctgggtttcaaaacttgggtcctcaatacacctaggcatctccctagcctcaccaacctttataataaaatgaatcatgagttgttaagaattataatgtgcctaaccaaaatgaatctggtaaaatttctggtacataaatgagacaagttagaaacaataaccagctaactggccacattatatttagcataatagatggtcaacagattgatgtaaaggctacaagaatcattgataaggaactgttacgataaatctttccgccaaaagccgcctgagccccaccaacacgtgtgagctttataccagccgcccgcccaagttggggcccaaatgaatacacagaaacctgtattaggttcaaagctgcttggctaatgactaggattctcatctgttagcgcagtcttaattatcataaacctatatattttataagacttatcttatcggacgccttattggcgtccctccttgtcggtggatcacattgtgccactggagcaggagcggaggggaaaagagagacacttcctgtttctccttcgcttaaatatgagtctcttgctatgtcacttcctgcctggatcagcacttctctactacatttcccagaatcctctttgacccctagtcccgtctacttgctgtctcattggccaaacagtattttaattaacaatcaataagataaacatacacagtacattccccatcaaggaaccctggtagaaataataatatatttgggaaagagccaagggaaccagaaaccaaatccacaaaagaagggaatccgttgctctcatcctcatgcctttggcatttccacccagctattgagttaattttcctacagcctgccggactatactctgagagtgcatggctacctttactgaccaggaagaaaagcactataggtagtgagcctttccttcacaatctatggatgaaaagcaccatttccgaagcactgactcccctggcactaacacccagctattgtcaatggccataaaaataaagcttaggggaaatcacatacaatggattaagaaccattagttcacagtgcagtgttcctcacacctgaaatacaaatggaactgctctcccagtgttgctcacgtctttactagaaacactgtggccttaaacctgcctgttccaaatactggaaactcctactcattcatatctttctttcttcataaaatcctctcatctcttgactaaaacaatttcaaattccaccttctcatttttttttctctagttccttctctggttctgtttttggattctgattatttgtttattttggtttggtttttgtttgtttgcttgctttcccttcggtagcggctggtgcaggtattttacctttggacaacttaggtggctatgaatactcaaagagattgttttctaaatctccagtctctcccctcctgtgatgacttctagtttttctttctcatcactgcttcaattctatcttgagactgcttagtccttgctatgtgattactctgcctttgtcctaaactccaaaatgtatcttatccttcaacaaaacagcatgcatgccctaagagctgtgaacccattaatggctgagctactgtctcttacaatgaatgttcctcagaatcaccaggggtttattaaaccacggcctgctgtccccatccctagggttaacaattcacttacatttctaatcatttcctagttgatgccaatgttgcttagactaattttcacccagcacggttaccatccccaacaccctggtcattggttatggtttctactgcatcatctaatactccagctgagattcttatcgactcagacctgcactcctgactgcttctagtgttcctcttcagatcaatcctaggttccttcgccaggcagtttattttcttgttgataacttttggcctctacttgctgagaacatgttaatttctcacaaggctcataaggtctttaatgttctgtgtgatgaagatagcccatgtcatagttgagataagaatctccctcgtgctgaaagggtcatgtgtacaatgtgtagtctaattcaaatggccactgaagagtgactggattatgagggtgccacctttatcaaaggattaatcaattaatgagctcctaactttaggaagctgagtctggttgaaagaagtagatcactggctgcgtgttgcttggtaggttttgtctcctgtccaccatgagttgagccactttgttccactgtacactgttgctctgtgatgttctgtctcaccaagcctgggtctagaagcaacacagacaaagactatgacctgcagcctgaaaccacaaggcagcacaagcctgccctccttaaacagtgacgaatattctggcctactgcagaagggtactgtgaagattaataagatacaatcaacctgtgttcttcaaacttgtcagaagcgtagtctctaaaacctcaattaatcaatgctgagccaccactcttcaggaaaatacggagttggaatccagcaagcctcgggtcacatttttgtcacacggtccatgtgcattctttttgaacatgtgtccctgttgaaagttgttgtatttaagacctagtgttgattcactaacactgaactgatagcccatgacattctagcccatatcagaacaaagcccaacacatagtctttccactcggtctaccaaggccttctgacacttgggaaaaccaacagcattttaacactaagtgtcaagctagaggataccacaaaaatgtgaaaggcggggcactaaatagaccatgcaaagcatgcttgcttacaggcctccctttgttcaaacttacctgggaaaacccacacttctgagagcaggatttttctgccacactgtacaaggttgcaaataaccaccaaggaaccacagaagctaagcaccacaatcagttttagccattaggtgagtttgcaaatacacaatccattagtaacgaggaatggtgtagctcaatggtacagcatttgcttagtatgtacaaaaaatagcctgagttccattctcaatattgatagaaaataaaagcacaatagagagtattgctctgatgcatcaacaattaacaatctgagtgttggttatgtgccttaagctcttccaagcatctttcacaaactaatatgcttaaaacactcaaagccgctcagacaagaatgattttgcagtgcccattttacaggtgaggaaactaaggcactgaataaaatacttttctctgaggagaataacaaatgccatactcacttcaatacctaacatttcattaacagttcgacttaaggtctgttatggttacaatttgtacccacacaagtcatgagcaggaaaagttaccccaaaagtaatttaaaaaaacacatcaagaaatgtactactcagcagaaaaaggcaatggaatcttgaaattcacaggcaaatggatggaactagaagaaaccatcctgagtgagataatccagtcacaaaaagaaaaacatggtatgtactcactcatatatgaattttagacatagagcaaaggattaccagcctataatcctcttcaccaaagaaactaggaaacatgaaggactctaagggataaatggtccccaggaatgaaagtggcatgaactcctgaactaattgggagcatgagggtaggtgggagggagctgctataataagagcaagagaagaggagtagagcagaggaaatggaggggcagaaatattgagttggtggaagaatagaggagagagagcaggatgagagataccatatcagagggagccactataggtccgagaagagatctggaaccagggagatctccagagacctacaaggatgacacgatctgacaatccaggcaatggtggagaggataacctaaaagcccttcccctaaaatgagattgatgacttctctttatgccatcctagagccctcatccaatggctgatggaagcagagacagacatccacagatatacactgagctgaaatctggaatttagttgaagagagggaggaatgaagagcaaaggggtctgtaccaggttggagaaacccacaggaacagttggcctgaacaagggagagcacattgaccccagatgctgtctgggaggccagtacaagactgatccagacccctgaacttggatgtcaataaggaggcctctgcactccagggagtctctggtggtggattaatatttttccctggtgcaagaagggactttgagagcccatcccacgtgaagggatacactctggccctggacacacggggaagggcccaggaccagcacaggaagatttggtggactttgcagagcccccattgagggccctaccctgcctggggagtggtgggtggctgtgggtgggggaggagagatgagggtgaggggagggagagggagaagggacttacatgtgaaacaagcttgttccctagtggaaatggcctttgaggctagtctttgggggtaaatgggacttgctgatgtcagtagggtgcagtgtgttagtggctttatgaaaagaagaaatctaggctagatttttggtctctcacaatgtattgctgccccctgctatctatcatataaggagaacgactttgagaaacatcagtgttaccctcttggacattctagcctccatccctgatatttaaataaacctccaacttttacacattgtacaacccctgaccttcagttttctgaagaaagagaaaaacaaactaaaacagggtctaacaaagattctctcttgaccaaactgtaaccagcttcctctgcaacttcaaccttgttttaaaaacacttgaacaaacactaatatttctcaaggccacatccttagagtgacgttatgctctcccttaatgcgactgtgggagaaaacccaagattgcccacgtcttttatctgtttcagaagcagctaaagataagtctctgaaataggacagaaccttagcttctgtcactgccagctagcagacacaactgacttacgctcatatagagaacctaaggtcactctcagtgaagaccccttgtcatgttcgcttcctgactctcccaagccctttctcatctccctgttcctccttcatccctttaaacgtccatctctatacaacccaaagctgccttcagcttacagcagaatttctccccactgcagttgcaagcagggaccaaaatctgtccctagcatcatagtcagtgtctgcctttgcttctatttccacctaatactaggaatcttggatttgtgctcaggacaagtcctcctcagcccatatcctccgtgagcgaattttctacaagtgcctgagacatgccctttgttctgtctcattgggtatagtcatcatgtatttattcattcatcaaacacttccctgggttttcctcgatctgccaggctctgtgctagacattggagagacaaaaaaaaaaaaaaaaagtacaaatagtattatcattaaggctttcaatccctgtgcataaatccaatgacagaggtgtgagcacaataattatagcatgaggacatccataagggctctgaagaatgcggcttttcacaccaagtgtctaaggggaagtcaagatggaatagaagagatgttcaagcacggacatgaaggataacagagtcttcagggaaaagatgattgtcccctagaccaagctaaatctgtaggaaaaacagtgagcgataaggccaagacagcagtggcaggcgggagaccctgtatgtcaaactcacaggcctgaaactttttagagacacaataagcagcccttgaataagtcaaagcagatatcaggggtaaacaaatttttgttttcacaaagataactctggtgcaacgtgagggaagagattagaaggggtcaagactggaagtaaggagatccatgaggagactgtggccataatccagataacaatgggctctgggctcaatcattggccagttgcctgcattggaccagaggccaaaggcaaaggtcaagtttccattggaggagaaaagctgcccatcaagccaaccggacatagcagtttgaaggccaagttcactttcacttctggatctctactttcttctcccatgtggaatgttcttcttcccacactactacaaattaagttgacaaaggaatcaccttcctaagaaactattcattatagtcctctacaacttttttatttctttaattacttcagtattctacaatatacattaaatatcttgacaattacattgtaccttgtaagttggtttacagataatatagaaaagatacagccctataactaaattgactgcctctttatttctgtttttagggttttttatttcttttaaaatgcacattacttttaatttttgaaactgaaaagcaaccaccactttattaaaccagcataattcctaactgcgttctaaatatttgtccttatatacctacagataagtataggtctcacccctcattcaagaaacatctcctagcaacagatggagatcatcacagaaaaccacagccaatcaaatgcagagagcgagtaacttagtagtgcccagcaacaactgatatgtctatgacacaactccttcgactaaggctcaaggatcatagcagaggagggggcacaaaggttagaagagccagaggatcaggaagtttaggtgagaattcatctagaaatatcagagaagatacacccaacatggctgcctatggaagacctgaacaaggatggcaccaacagacatgctaacactaaagggccctggggtcttatgttttcacattttcccctatctccctgcaagcatcctaggataccgtagatcagaacatgtatcgagtcttcctccatatttgtactcatgcattctttgatcatgggaaagaatcttttaataagcaagggggtttccttagttaatattccatcagattcacttgccgaatggcacgcctttctccccttagcaacactgtgtggcatgaagtgattttacaccatctaaaactcaacagaacaagctcttagcttcattgtatttcagcccttactgctctggagcgaaacaaaaatactctgtggaatccatttcttctccaccacgctaaacacacattcttattgcttcccagaggctgactgcttttcattttttaaaaccaacacaagagccagacctggtgaaataatcccagcccttggagagcagtggcaagtggttccctgtgggtttgaggccagcctgatctacagagtgagttcagagatagacagaggtacactgtgagaccttgcctcaaagcaacaacaagatcctgagatgagagtctctcgtcctttttcggatgttaaaatgctcacactattccctaaaacaaaatgttctttccagaaaggtctgtcttccctgctgcatggcacggtaaacaccatcttcaggtgttaccaaactggtgcctgcatctccatcactaagtatctgtgcttctcccctatcctggcctccttacacctcctgagaccctgtgtctcactgccaaagtactgattgcacaactaaaatgatcataaacttagttggacccgaaagatggttgacctacactttctgaattactttccgtctcccttagacccatatttcttaaatgggtttcatcttggtactattactaaataccttatgaagtcataatgaacaaatattaactggtagggactcaacatttagttgcctaacagtatcaatcttatcaaaacctagaggtttttttttttttaaatcataattttattcaaactaccaatttacattagaaagcagttgagagctttaggaaagtactgcaaaataaaaattctttttgaaatttcaaaagaaaaaacaaagaggtaggtcagtgagtgcttgcacaggtacacacacacacacacacacacacacacacacacacacacacacaaataaatcttttaaaaaccagctgggtgacaatggggtaaaacatgctatatacccaacttataagttgaagtaaaagattttagagaaaatggttggtacttatgtatttctatgctacaggatataaaacgattttcaatttacactgtagctcaaataccacagggtgtgtgttaaaggtgaaaagttccattttagttttatggcacaattccttagacaacacaatgtcttcagagcatcttacaaacctaaaatgatcagccaagtgctgggtaaagtggcatactcgggaggcagaagcaggaaatcaaaacagcagagcatcgaagtttaaagctaaccatggcaaaaaaaaaaaaaaaaaagatgtttttggaaagccatcgagacctgaaaatgcaattttatatttaaaaagacctcttggattctgtaagactctcaacagatacactgaaaaagtggccatgttcacctctttgctcgtaagtgctcattgggttttctttaagccccaagcactctgaatgcacagcagacagcatgcaaatcctcgtactgcgagggcgcttctgcggtcatgcactgtttctagggatgttggacactcataattattaattacagggcagagtgacactcaaaattcattcaacaatttccaaagagtttcagtagagagaacaggtgcctgaacgcacatgtgaggacggcactggaggcctggagaagcagtcctgaacatctgctaatccaaccacagaatgggccaggaaacccttccttatcatcatgcacatgggctaagagtattcttttcccagcggcagtggtaacttatagaggtgcagagctgccctctggtgaccaagatgcaaactgcaaagggcttcattggcagaaaccgttaaatccccacccacacacccacccaagtaactaaacaatagaacacattgaagttgtaataaaacttcaaaagaaagagacaagagtgaaataacaggcttatatgtttctattatatatttgaagatctgactcttacaaaaggtatagttcaaaaataataactcttaaaatgagtgtctcatttcattcatccaatggttttacagtgagatggtacaaaacagtcacctggagattacccacataaaagcagaatttttcatcatagaatctgtaagaaacaaatgactacgctcaagttttagcttactgctatggcttttgtagttttagcagagatgcttttagcacctccaaacatcatttcatcagtaaaatgggaaacatggtagctattttaagtgttactgtaaggactacataggtcaaataacatgtacataataagacctgaacccagccctctgcaaagagcaccaaatgctcataaccactgaaccatctatgcagctcaaggcaattgttttgctgttctttctttctttgcttaccattgctggttttactattctgttttcataattttagcttttgatctcggatcagtataaattagtcattgcagctaactaaataaccacaggctgatgtcactaggcatgtctagtgcacctcagtcaatacaggtctcccctctgatataaacaataagaacaaacagaaagctgggaaagttattgtgactcagtccccaacagcaactttattctgaacagtagcttgttttctaatgtagtatgaaaccagtgtcaaaggaatagatgggagtaactataaataaactcagcagctccttgcatatccagaagagtaactgccatccacagtcaggattgtatgaagtttttcctttctggacattttaaatgatttatttctgtgtgtatctgcatggttgcatatgtgtcagagcatgtttgtgtatgtgtaagggggccataagtcagtatccaatgtcttccttaatcattctccatttttgcagggtctctcaatgctgctagaactcgccgatttgacccctgtctctgccttgccagcatggggattacagacatgggtcggaatagatacaggtgtctaaaaagatgccatcaaatgtctcatcttctaaagtaatttaagagtcttggatggcccagtaacacagtcattatcacccatgcaaaaaagccttgcttccattcatattgtggtaggaaggtgtcttactaggcattagaaaagccataccaaaatcattttaaagagtccccctggaactgtacttagacatgtcatagaacagacatttcatgaggtggcctgaagtttctactggagacagcaaatgctggaactaactccacagttggaaacagaatgatatcgatctgaaaagcttgtacttggttcattcatcttgaaggatgaatcggattgcaaaatataaattaaaaggagcatttccttttgcctgacagaattcccctacaagctaatactcgggcagcccagccatctgtgcagatgggaatattaatcacagatctatcactttttaaaggcaaataatagaaacagggatttgccatcctaatgaggctttcttacctgctggacaccgttagaacattttttcgggctttccaaaatagaggattgaggttctggattggaaaggaagcagacagtcagtaccttaaagaacaaaatttcccatttcctcagttaaaagtgaaaacttccactagacatatatttttcacagtaagtacaaataatttccagtcttttttccaattctattagtgtatcatgagaatatgactgcttttcagcataataaacacatgatgagacacacttgtgtcattagctatttcacatacagaagtagccccatgcaagcactgttctgcatgccagccttaattatttttcccaattggtttttactttctccaaaagtctccctacttaggaatgtcaattgtgtttagtcacttagtgaaagttcgtatgtggtaagaccacctcagtcttgaagcaatgggttttaaaggctctttaaaatactgacaaattcagtttttatttcaatgcaggatgacaaacactgccacctagaggcacgaataagaaggggttctgaagggcttttctatcttcagtcttgtcatttgagatgacaaatccatcatagtggaaacacattaggataagtagatatttttgttggtggtggtggtgtttaaagagagggcagtaccttctatgtgaaaatttaataacataaaaataaatcatccatcctctacagtttagagatgagcagtccattcaggggcaggatgagtgctagagtttaaatctcttgtccatcaaggacaggggtatatagtagacactacaaatcaggttgagagtaactgtccataagtatcataactgatgcatacaacagtgctacagaactaaatttcgtagttagtgtttaaagaacatgatgtgtcagggcccaaaaattatcgattataaagtattgggatccaaacctcctctccatttaccaggagcctgaatctcccattgtctttcagatgtctggttaatcaccacctcctgatggcttggcctcagtggagaatgtctcctagtttgcataacaacagacctaggccctgggtgtgcctgcacctactcagagaacttgcttaatgcctagagaatgtttaggtgcctcttgaattaaaagaattacttgatgtgagctatgtacatgacagtagatgccttctgtggtcaccccactgttgaaaagctatttaggaggatgctagaataaaccagagactctagtttccagcatggactgagagccctcctgaaatgacatgatgcctgtgtctgatctttatcacctttgggtagctaggagtttcccggtccagcacctccagactcaggaatggacctgaggtcatttggctggctccaatctcagccccagagatatcagtcaggaatagacagtgtttgtagcatgggactgatactgttagaccccaggaaaactcaggtatccggggtcccaggccacgaccgaggtcaccccaatcaccaagcagatttgagagcttgctgcaaactgcatgaggctttattgtaatttaacaagctaaccccatgttagcgcgggtcttttgtagccacccaccatggcggttggctacaaaagacagtttgaactggctgccgagagatcttatagggcagcataaggggagtgtccaggggtacgcacaggctcaggattggtgtgcctccaggcttggagggcttgccatgtgttgatcgatcggtcaactggttgttatggcccataggccctcccagggtggttgctatgctctgtgcgtcattgctgtgtgcttgtccataaagtacacccagggtcataaagcatagcgctaccagctaacttctgattggttccttgtcacgaggcaggcacctaacctctagtgactaagataaggtcatagcgagcacatgttactgtcatggctgccgaaatggggggctggtccctttaatacaagccgaaccccagcaatgatgtaccaagaagtggcattgaaagctttgtactcagctgaacagcatggcctcaacatgggcttgctggccttggatcatttgcctgggcttcctaatttctgtaaacatcccatcttccccattagctcactatgctcctatgtccatggccatcttctgacatgattcctcagagcttacaaagccacaccggctattttctatacccacaatactcttgtttccttagtccctcgatgtcacccttctttagttacttggtcccttctctgagaactttgcccaggcctgcaggcagacttttctttccctcccaccagttccaaataaccaattcagagacttaatattaattctaaatgcttggctgatagctcaggcttgttactaaccagctctcactacttaaatgtacccatttctattcatctgcattctgcccaatgttgttacctctcttccatcgggcacctctgtgaattttattataactgcaccttcatacttccctgagactccctgatctccagcctttgatagtttatcacatcctacattctgtagttcatctctttgctactatattattccatgttatcttatgtcttcaaggctctgacttcaagctctcggtgttattgggaggtcaggagaactttagaagatgaggtattgttgtcactttgagcatactttagaggcaacagtgggaacctatgcatcacccttttctggtccccagtggttaaaaaggtaaactgctctgattctccaatggtctgtttgaccacagatccaaaatcatgggacctttttcattctgcaacttgattttattatgtgatactttttttttttaataatgcaaaactaagtaacccacgtttcacggtaacatacactccatggaagcaggtacttttgtcaaatgtcctcctgctgtacaatcagaacagtgtttgctgttttaaacacttactgcggtaagtgtttaaaacagttacaagagtgaatataagggtgaaaacaaatgaaacattgtatcaagccaagaaacagagctaccatgaaaaagttgggcaactgtgttagggaggagtaatgagttcttcagaggtagtataaatctgcctcccatctacttacttcctgaacttcagctaagaatgtatctttaaaaacaaagcaaaacaaacaaaaaaaaatcagagaatagcatggaacagtcacttgccaacatgtgtcagagtaagctagaatattaacaagtggctttagaatgcaactattgtccaggacaacactatttcatcaggctaatcaaaagcatattcccctgacattgaacttgacaccagtgtcatctccatttgaagagagatcttttgtttgaacgctaatcaacagttaataaagcaaaccctaaatctgtttctgtctctcccacttccacaaaacagagaaccacacacaagtcctggcatagaggacagggagggaggtaccttttcttcttcggtctacttcaacattacagtaagagcaaacagatctcttacttacactctagggtttgtcttgttttgtttgtttgtttttaacattagacatgcacacaaggattcctagctttttttccccctgcagttcttgaactggcaaactgtccacaaaagccagcttccaggctcagatgagcaatgttgacaagtgtgttcagtaaaataacacaatccgagaactttttattagtgtcattatcaatcagatattgtgagcccccatactcaaattctcagcttccctccatctcattccacaggcacctagattaggttatttctccctttatctccatcctttttattgatctcttttgtggaaagcttgtgttaaaacagcaaagaaacattcacatctcaaaacaccctgcaaagtcacaagctaggatgtaggaatctagaggcacagacgcaaagtagaaataaaccaactccactgagaaatacagtgaaaataaatgaggactaagatcaaacagtagcatagatatggagaagaaggaaaatactagcctagaagacagaaaagatactggaaggaaaatgagtgaaaagaattacaaataacaaaagtgctgtgcggtgggttaaaaaaatgacagcatacaagaagcaaatgtttggcttgtgagtgacagctcaagacccactcatggggcaggtggatttgagaaggcagcttagttccatcctgtattgagcttcctcgatacacatgactgtcccttgtataaactgatacacctgtttctaacttttcctcactctagtcttttttcagaatccctttcaaccagctctgacactggaagtgtctccatcatatatcagaatagctgaagagtccacacaatgaagacactttgagggtacattgaaaactgccaactccactgtccctttgaaacacccctcctcccaaaaaactagattttttgggtttaaaaattatcataaagcagagagagggaaatgatatcatcgacaaatcttttgctgttctgtagtttttaagtaacctcacaaattctaagcatagtctaaagttcttgggttcctacaagagccatttgatgtggtctgtgtttgttcataggttttaggtccagggcttcagtgtgtgacacaggctaacctcaaagtcctgatccaaatgcatccacttcccaagtgtgggatcacaggtgtgaacagctatccctgactattggaaagagaagggagtaagtgtagcagcatgtctctctactaaaagggaaagaaaattatattatagtccaaaaatagaaaatgcatcaagtagatattctttttgttttcctgttttgttttggtttggtttttggtttttcgagacagggtttctctgtgtagctttggagcctattctagcactcgctctggagaccaggctggccttgaactcacagagatccgcctgcctctgcctctgcctcccaagtgctgggattaaaggcgtgtgccactaacgcccggcttcaagtagatattcttaagaagtttacatggtaagtattaggcagaaagctaacattcaatgtggttcaaatctagttaatttaagagacacaatttattaaatggaatttaaattgcatgcattatgattggcgactcctacgtggtagatgctattaattctaatatagtatgtctctgacaggtaaaaatggaggagggggcacttaacatgttctaataggctcatccatatgctctttcttgtttggtagtagagtcatctcatcactgccaacagaagatattcacactcagatcccaactggctgaagagaaaatacaggacacactccaaccccaaccacccatacacagaaacacaatccatccttctatcccaggattatgtgacaagcacagggagacagagcacaacacctcatccttggtactccagcattagcttattagctaaacagtgtcaaaacacttggacaaaacctagaaatgggcctgtgataccacattgtggtacaccacacatgatctctcgtgagatttatttttgtttttatttatgggtgtatgcatatacctggttttgtgaatgccccatgtgtgcagatgtccatggaagacagagaagggtgttaggactctggaccatactaaactcaggaagagcagcaagcactcttaaccacttagccatctctccagaccttcaaaaatccttcttaggaatcataagagacatataatctatataatagaaagcatgtgcttccctaagcaaaggttgaagatggtacacaattgcccatgcacccccttcccacttggaaattaaggaataaatttccatctaccttcagatattgcagattcttctgagatacactgaagtgagctaacctaatccagattcactttattacttcatcctaaattcctttcctttgatctatctccctttgtggtccttttgtgcatcttagatattcataagctgtttaaatgttttcttaaacaaatacaattcattcaaccagaaaataaacattgttggaagatttccctagggaaagtttctattaagtttctcactcaatacatgaatacacatacacacacatacacacacacacacacacacacacacacacacacacacacacacacacacacagaggtttgtatttgtttttcattcctccaggactctctgtacctgtattgctttttttaaagtcagtcctgtatttgttgttttggccaatgtcattgtcatggaatgatgaaggacttgaatgaattgagaatatgcaataccttccttacaactattcatttctcttctgtccactatgaagacaaacgtttagttaatttttgattatgtgtaaaccaattaaatgaccatctaggttttttattttttactaatttctctttagctaacacacaaaataatggatttcattaacatacttttgtgcaaatatatgtttgtgtacatacatgtacacaaatacacacatgcacacatcactgtttgctctcctgtcctactttacagttccactgagagatccactcaccatagtttcccttctgcactcaataagcatgtatgtgcataagtgttcatgcacacacacacacacacacacacacacacacacacacacgcacattctgcatgagaaaaaaatattacattttctttcccctctccattaaccagtattgtctcccatcagcctatccacctactttcatgtcccctatttcatgtacatttattatagacattaaacgtagattccagcccggtggtggtggctcacacttttaatcccagcacttgggaggcagaggcaggcggatctctgtgagttcaagaccagcctggtctataagagctagttccaggacaagttccaaaactacatagggaaaccctgtctcaaacaaaagagagagagagagagagagagagagagagagagagagagagagaatcatgagattctaagactaatttgtattctccagcttcagctattagacaaattctttagacacctattaagtccgtctgttttatgaaataatgtatctctttgttggtagattttctaggtcaacactctttgatagcaccactgtggtgttaaagtaaaacactattgttgtacctggccctatttgaccctttagtgattccattatgaaacttaatgtgccaaagcatacaatttataattgttcactttactaatgagtggttgccttcatcgcctgtgtcttaccctggcttcaagtctacttcatctgacatgagtagagctactatttcttttcagttcacacaattttggagaattccaatcctgtgaacctccagtttctttgtggttttgcaagtgaagtttgtttctgtcaacaacaacaacaacaaaaatatccggagtttgggttttaatctaatcagttttctgtgtcttttaactggaaaactgagaccgttttcatttattattgagagggtttgctgcttctcctaattgcatttgttgttttactatttattttaatatgtttgttcttctccctctacttcctcacattagaggtttgatgcttaactgagttggagaaatgtgattctttcttatttctctttcgttcatctgcttgcttttacaatctattatttcctgtgcgctctcaattaagtaaggccatcttacttcatcctcccccgcagcatccctttatgtatcctccgcaatgctagattagtggccacagattgtattaattttttacatgcctcaagaggtttctatatttccactgactttaacagataactttgtgaggtataataatcttagctggcagctatttcttccagggaactgaattctctcctaacttttaatttttagaaccggtatgtctttgtgactcagacattttgtcttacagcttataatggtgtttctttgttctctgatcatagtatttacctggtaatacgttatagtaaggttctttttgtcagtcatgtctatttggggctctaaattctttcttgtgcttggatgttctcttcttttccctaggtttgggaagtctcccctacaatgtcactcagtgtgttttttcatgtctgttggtttgaatctcacctccttcgtgactttttaagttttgtgtccttaacctttcctagagttcctgaaagtcactttggttccaattcctctctgttctttgttgatgctggaatgttgcatttccctgaccttgccttgactcctacattcttccttctggctgatcccgtcttttgtgaggcattccactgtggtctttgttttattgaaattttcacttcctatacttgttttttttttttaatttgttttctttgttgttgtttcaatctcaatgtccttactgaatgtctaagtcacattcttaactttcccttttacattacaagcatccttatccaggcgctaaataggtttctctctggattcatatgcttatttttaggctttttaagtttgttgatttttataaggagacctttgaataatgtgtttgaaatttcaaccatttcatatctttagactcagtaaatgagactggggagttataatcttctggaaatcttttgccttgatattttttaatgcttcttgggtttgtgtgttggtatagacacctctttcaactttatttatcaaacctcctgtcaacagctttctcttcagggcttactcccccggtgccatagagatatgaaaatgcaaacttcttaaatagctacaacaccaaaccaaataggatgtttaaacacattttcaaatgatgaaagctaaccactctagcactgatgactataggatagaaaattagcaaaaagaaaaatattcatataagctgtggaagaaaaaataaaagtaatgcataggggaaatgaaaagatgagaaaggcatgacgtgaggttttctttctaacagtgctccctctaccgacaggagttggtcatagcatgccctcacttctttttccagatagaattaatgcttccatgatgccttccaaacacttcacacggtctgtttatacactgtgggccgatcctcagagacagtatcaacagtacaaggagaagaaagaaagcaaaagaacaaacggaatctgacctttcactggtgagaagtgtcaggttttagcttggtctcagtgctaaaaattcatataaagaagtattggtgttttggtaaatatatgaaggttggagggaccttgtttataaaaagtgactatagaaaaattaaacacatgagaaagtcagaagaggcagaagcacaaatctgaattaattggacctgtgaattaacagcccccctttttaaagaagtagaaaaaaaaaaaaaaaaaaaacaccctccatcaaaaaagttaaaaaaaagttagacatgacatattgcatttagcaatttaaagcatgatgtcattacacaatagtatgtaactagcccaggtgtatgtaaaaagtttacaattaatgataatcatactattaaaactcacaatgatcaaaacattggtctacagggttttctgtgatgctggtgtctcattcttacatttgactgacaagaggggaggaggaggtacgattccttggacatgagaatgttccttgtgtttttctaaatgaatgtaacagaataatcatgaaagagcaacattggtgtgctttagacaaagactgctctgtggtcattggggtagagagcaaatcagccacagaacaacaggttggtggtttaaattactttctacttacctctatcatcttcttcatgaatgcacaatttaaaaggagaaaagttactgtattaaaaattactttctcaggcattttacaaactatgttaatctataaagaaaacagccaagtcatcattttcctcttctggccccactaccatcctcatcaaactagaattcaggtgaattagttcattctcagccaagtgctccttcagtaacctaacgatttaaaattcatttaaattatccccaaatactacagaatagtattatcacttctgccagaaaagttgaaaaatatacagcagaggcatcaaaacattataccaaccaatgattcgaatgcaggaaaggatggaaactattgttccaagggctctcgatgaaatagcttaaaactgcttcatctgtgcctacaaatttaagccaatagcatttgagcctaaagacagccatacatataatgggatcaaaatctttacttcggtccttccttctttacaaccaacagtgtctgtatttgcatgttggactttcaggcactatcaagtccaaactttcttttctctgaagatttttatgtgtggaagtctacctggccccttgtcaatgagtgttgtagtaaagagaatcttgcttacatgaaacagttctctatattctctcactaacttgtgcttatttttcattctactggattatatgccaactactgaataccaagcagtttctccaaaacacaggacattcaaagatggaaatgtggagcactggtgctttgcttggaagaataaatgataaaatacatttgccaagaaactgaaattaaaatcaagagggtaagaactctgtgcaaaaaatgtggacagaagcctggcaaaccattaacagagtcactgttgattttaaaggaaagataataacacaaaataactttaatgataactgtaacaatacggccaagcacttccattgacccaggcactctattctgcactctaatgctctacatgaagtcatgcatccctcctaatcatgctacaaagcagatgctattctcattaacatttcatagatgaggaaatgaaaacagctgtttggacatttgcctaacatcagaaagcttaaggactgcagagcccaagatacgtagttttatattttgtcctggcacaaaaagccaaagttaagcttctttggccatcactctttcacagagacagtgtaggtggtcaagttctaagctctgaaacccacagtatcaccaaggaaaatctggtgtggggaaatctgtgggtagaaacaattctgttctatttagtcttcgcttatatatcagaagatgggacttactcctgctcagtccaccaggagaacctggattctattaagaaatcaccatactaatgattttctccaaataacactgtgaccagtctcatattatcttcccagccaatagcacaaaatagtttaagacaacaaaaggaaaagaaagattggaatattctataactatttttttttttttgctttttcaagacagggattctctgtattgttttggaacctatcctggaactcccagagatccacctgcctctgcctccagagtgctgggattaaaggcacataccaccaacgcccagcagtattctataattattttaaagtgacatttaagcacatttacatttctatgctcctttcccagttatctgtatagttaaagaaaagaatgtttagacatacaaacaaaactttaagcaagaatattcagagaaaatggagaaaaatgttccccaagcgtctcttagcccaaatgtggtgtacagtttcaacctggtggtggatgggtgtctgtagacaatgatcctcaaacttcagtaaatgcagaaactactggagcatcccagtctatctgctacccctctacattctagtccagcagctttggacacagtcataagaactttcagtgtcccaggcttcccattgattttaatgggttgcctgcagcagctatgtaacaacaacaacaacaacaacaacaacaataataataatacctgcaagagactaaagacttactacccagcaaatgtttgcagttacacattaaatcacatgatcttgcaaagctgcctgtcccatatcctacctgtgtcaacatccttgggactgtgctcttcatcaggaagcctggatggtggccacatggatggttctctcctgggaaattgcccttcgctgtaatccatggaatgtgtaggttgactaactgcagcccaggtgtaaagctgatcttgctatatttaaaaaggtgtttaaatggaaatgttatcaattcaatcatgaaaaacaaatggctaatacattacaaaatgtaaaacacagacacacagagatatacaaacacttctaaagcactcaaatagcatcttgcattgttcaatatagagccattaagacaccaattctctcaaactgccctgtggccacatgcctcattgtcatcatcatcatcatcatcatcatcatcatcatcatcgtaaaacctaagtctctctctttgaaagaagagatgggcctgccaggagacattccagatgcagagttacataattcctgaaaatgcatcactaaccatctgaatatggtttgacttttgcttgctttgcttttggtttctcaggccagatctctctcactatgtagcaggctggcaagagatcctttttctcagtttcctcatcatctgaaactaccagcatgcatcaccacactgggaagacgtctcattaaaacttgtttcaccacttgtgggaaagtcagagggtagtctacacttggacaccacagggacaataacagctgtttatcttgggtcccaaagtagaaactggaagaatggacatgaaaaagtaaatgaacctggcaacagtaaggttgcaaaaaagagtctttggcaaaggaatgctttgccagctgtgatcaaaataaaggggacaaaatagaaggttcctgtgtgtatctcatgctggggacaaactggctggctcccttggagacctataaacacctcagaactgatcatcagaacttcagaacaatgccagtccctgtagggagaaaccctgattacaggtactgcccaagtgggcgtagtcacaggtatgtagcaggggtttaagagccagggaggccaggtggctctcttgataggctgagccaacactgggaagcatttctgagtcagtcctgctcagggtgcgaacctagtcactggttcccttgtgtgagtattttcccctaataaattaccggttattaacatctgtctgactccacctgtattctgctttaggatgcacaggattggtgcatgcacgagattcccttgtgcctttttcttcactgagatacagtcattccctaccatgttttgatcagcactgactaaagcaagggaaaaggcaacgcagtagaaatgaatacagatagaaccataatcaccagagtgagattagaaaggcaatgagttcactcaggtagatgatgcatctgtaaaatttatataataggttaagaatccataaagtggtctggtgtcaaaagatgctgtgtgcccagcacggtactgcacacttttaaccccacaatctgtgaggcaaaggcaagaggccagcctattctatgtagttagttccaggccagccagagtgacatgagggaaggagaaagcagactcccacaggctgttgccctctgactatcacattcatatcaaggtatacaggtgaccaacacacatatatgcacacatgcagacacacactaagtgagagaatattttgaaatactttaaaaaatggaaacacaataaactaaaacctatggaatggacaaatgagagcaatgaatgactcatctaaaaatacagaaagatctcaaatgaacaacctatcaatgcatctcacgaaactctaacaactaaagcaaactcaatcgagaattagccagaaaagggtactaaaggccaagaatgtatatgaatattatagatgtatatgtatatgaatattatagatgtaaatgcatattacatatatgggcctgtatacaggatgaagagacataaacctagagggcaatgttctcaataaagaggattgggaaagttggattatcataagtagatgatataaacacaggctggtgagctggctcagtgggtgaaagccctcactgccaagcataaggacctgagtttgatcctcaaaagctatatggaaaagggaagagtgaccagcagcaaggggtcctctgatctccacacacctgccatggtaaaacatgcctgcccatgcacatacataaacatacagaaataaatatgaaaattacttgtgaatgtggatcagctacatagaaatgattcttcaaaaacaaagttgacaaactaatagccaaactaacagagagagagagagagagagagagagagagagagagagagagagagaaagagctcacaagtaaaatgagaactggaacaggaaacataaacgacagcatggacattacaaaggatcattagatattattgacaataataggtcaagaactatcataggtgaaggggtaggtaaccttaactaaccaatgatggatactgagaattaataagttttccatcaaagaaaagcccaggatcccatgacttcactactgaaatctatcaaatacttaaagaatcgataaattctccataattcctaccaaaaataaaaaagtcaaggatgaggcaatattttctagctcaaatccaggatcagaaaaaccagattaagacatcattgcaaagaacgctacatattccaggactaagaagcatctgtacgtagaaatgcatacagctcatggagatatgaagcatatggaccaaaaagaatgaacaaaatggcggccagtcacctgaggtttttggtggcaaatgacacagcaaatttctcattcgggcactgagtgtgggatgagtactctgggtcagaaatgcacccaagtaaggtttgactgtgacccagagtttcaactggtggatcagacttggccaaaaatgatgatgatggtgataatgatggtggtgatgatgatgatgatggtgatgatgatgatgatggtgatgatgatggtgatgatggtggtgatgatggtggtgatgatgatgatggtgatgatgatgatgatgatgatggtgatgatggtggtgatgatggtggtgatgatggtggtgatgatgatgatgatggtgatgatggtggtgatggtgatgatgatgatggtgatgatgatgatgatgatggtgatgatgatgatggtgatgatggtgatgatgatgatggtgatgatgatgatgatgatggtggtggtgatgatgatgatgatgatggtggtgatgatgatgatggtgatgatggtgatgatgatgatgatggtggtgatgatgatgatgatgatggtgatgatgatggtgatgatgatggtggtgatggtgatgatgatgatgatgatggtggtgatggtgatgatgatgatgatgatggtggtgatgatgatgatgatgatggtggtggtgatgatgatgatggtgatgatggtggtgatgatgtctgtgtgcatctatctgtatctatgtgtgtaagtgcatgcccacatgtgtacgcatgcatgtggagaccagaggtcaatgtcaaatgccttcctatactgctctccatcttatttgttgaggcagcatctctctgcgaagctgaagctcactaactgggctagatagctctggggaaactctgtagctctagggttacaggtacacacagtcacacctagcttcttacatagctgcctgttatccaaattcaggcgttcaggcttattcagcaagcaccgtacttactgactgagccctaggcattagtccctcacatcatggcaccctgatctgttgcatgggtttggcgaatcatgccaaacatagttagctctactcattcgctagttatccttaccttaccttcaagcaaacttgatttgaagtctgggaaagaagtgaaagtgtatcactgtgattcagcatccagccatagcaaaagctggtttcttaatgacatttcaaagaagttattaacccagtaacagtcacaaagaacatgaagtccttccaacaggtttctgactccacatacagttttagttctcaagaagaaacctaaacaactcttttcagccatattaactgggacataatattgtaggttataaacatgtctattgcatcagaaaaatcttcattttcactgtggagaaaacaggcttgagccaattaaatcatgtatattgttaggtatatctactattttataaattccttctgtcacacaaggaaaacatatttaactctcattttccacgtttctacacatataatcaaaaccgaatgaatttttactattgcctttactattgttctgtgtgtgtgtgtgtgtgtgtgtgtgtgtgtgtgtgtgtgtgtgtgtctgaatatgcatatgcacacctgtgtgttcacctccctaccacagccaggcagtgttggatccctggagctgaaggtacaggcatctgtgagccatctgaagtggctgttaggaaccaaattcaggctctatggtaaaacaatgagcacccttaggggctgagccatctttcctgccccaagactaaatggatttcagtgggctggattggggatttacgagtagaatgcttccctagcacttccaaagaaaaacaaatcttactgtgtgtctgcaccttgtttttctcaccctttcctctctgttacttaggcagctgatgtgtacatcactctcacacatctcactgcctctacgattcccattaatcagcagatggattgagttccaaattgctgttcaaaactccttttatcttttccagagacaaatcctgagagacagttcctactttacaggaagcccgtgctcattacaaagtcttttgcacccctcaccatcctttctgatgtcttgctgctttgcccaattaactgaaatccctcccgtgaagcaaagttgctgtctgtttcagagactaacaccaacattgctgtctcctacatggctccagaaaaatcttcctgatgcagcatcacctcctcctccctcatcctctggaaatgcaacacgggcaacaagggagaaaccactttgcaggtgctcacagctttgcacaggtcatcattttttttataagtatcctaaaataaatgtttccaagtttagaggtgtttgaagacaggtttcagggagcctcaatgtttcattctacatgagtctcttttgagccacacacgcattttttagaagtccactttccgtcatcagttaaaagtcgaggcatctagttggggttggcatgccagtagccaggcagtcacctttgagctatattactatgttgttcatcttttgagaagattttatttacttttacttgtatatttgtatgtgtgtgtctgtgtttatgtgtgtgcatgtgcctgcagagttcagaggaaggagtccgatccagtaggaggagtggagttacagctgactgtgacttccttgttgctaatcaaactctaatgacccctcaaacccctacagtgcctgggtctctgacgctctcctttgtccccctttgacagtgctaaggattgtcccctatgctatagacatactcaaccagtgcttagcactcagctatatcccagtctagaagcaggtctttcaataacaagataagctgcacctgtggtcgttataaagtttgcaactcagtatttctgctttagcactagtgtggcttctacaactgggaatctgaaatcacttcatattacagtaatatcgtgtgcatttaaaaatataacggtaaaaagaagtggtttcctccacagcatcctcaggccaggggtcttagagcttgctcagaagtttctcccattatcttcagtaaatcttaagaaaacacccatatatttggtaaaacatgaagcagactctgaactgttcagtccattataatcccatctgtgtgaaaatctgattgtgaattagcaactgtagaatttagaattccctgtgctcacaaccttggatgagtcatcagtaagcccaggacaaccaagggcttcatgagaaggatccgagaacagtggccatgttggacttcagcattgctagccaaggctccaattccagctgtttctgcctctctgagctgagagtaaacatttatgcagaactaaagttcagcctcagaaactctacaagctccttcttttcattctacatctgctctcacaaacccggtttgatgatgtcactgaattatcatttcgtcatagcaaagtgttctgcatgaagatttctcagggtactactaattgaatcccaactcttaaccactgagccacctgtctaggccccggtttgaggcttttcaaatggactaattaattatagactgttagtcacaaatcttagaatgtgaattatgaagaattcttatataaactattgcccatccagtcttccaaactagaaattattggctaggtcaatacctcacaatctcagcaaatctcccagaacaatgcttttcgtgttagatatggcactagaattcacttcacattcatcccagtggctttggactctcagactgaatgcaaagatttccccatggtcatcccaaacctggagcattccttataccaaatgggaagtgattttcataaacaacagaaaaaggtacccttgtatctgctaccataagcctttgtactccccaaagaatctgagctggacctgtggtagctggtgtgcacatgaagaccctccctgtctgttcatcctttacagtcactctgtttctgccaccaggatggctcgtgatttcctgaatgtaccaagatcttccagagccctgtgcccttatataaatactctcggggcaacagagatggctcggtttttaagagtgcttgctgctcatccaagacatgggtttggttcccagaacccatgctgagtggctcataatcacctgtaactctggatgttccaatacccttgtctctacaggcatatggcatacacacagagagacattgacaaacatccatagacataaaccgtttgtagtctcaaaagtttgcttttctccccaaatcaatttgcctttctagctggctgtgacggtgaacagtcagtgtcaacatgaagagaatccatggaaacacacctctgagaaaaatctagatcaagttaattaaggtggggagacaccacctgaatgatggtgtcattcattggggaggaaggctaatctgaatacgaaaggtaaaagcaaccctagcatcaatgtgcaccactccctgtcttccagctgcttcacactcctgccaccatgactttcccaccacgatgagctgtttcctcaaaccctgatctcaaaccaactcttccttgggttgcctttgtctgatatcttgtcagagtaaccagaaaagttaccacccttgtaaagctcccacgtgacctgcaagtgcaggtgcaaagaaggctcctacttgttccacttcccagtcatgccacacagcatagagtcatagagtctgctgttatttcaccatgggaactgtctcttgcctctcatccactggaatgtaaactctcccaagatctggactatgcattattcttaaatggggagaccctgtagtcatgctgtatcctctttgtcttttacttgttagctgggtctcatcaatagaaagtgcatgaatctcaaaccaagaagcttcttggttaaaatggcaggttccatggacatgcagaattctgagccagcttgagcgacataaggagagcatagctcatatcatgggcattgggtcatactcccggagccttgatagtaagatctggttctgtttcttaactcttgccagcactaaaagggagtgtcacacacagagagagaaacaggaaagttgaacttatggactgcttcagtccaaacaggagagagacattctcagtctgtctccatcttgctcacaatgatgtcacagtttgtagaaaggaagaaacaaaagccaggaaatgtgcacatgaagatggaaccttcccccagttaccagttaccagaagcaatgaatactaaggaactggagttctcccaagagtctcattctgaaagaggggaaaacatgaatcccaggtgctatgggtgtggggtatctcccaagaagaagtttaacacaattctgacttgttagaccaccttacaggaggcacagactctgacaatgagggtcaatggtgaactagaccacaccttaacttatgcacatataatgccttctatttaaacctaagttagtaccccaaggaagacatggatttggggtgagggtcatagtccaggctagtttatcttctcccaatatggccacattcaggaaacgtggcaactgactccacctagtttatcactggtatcaaggtctgggcttgcaccctaaaagctccagttaacagaaacagtcttccttctgtcctcaaagttcttgcaaaagtgaaggaaatctcaatgcctgcaacagtttgcttaagcaaaagaaaacaccataggaaccgacactggcaattctgtaagactcccgcccttcacactcccgagctgacatttctcaaaggtgtgagctgaactgtgtaggaaacagaagtagagctatctgctgggtttcttcctaggggaaaaaaaacaaaactaaaattaaaacttagcattaaagcctgtcactgactatttatagcacaggaagctgggactgagattaagatcagtgagaagtctgctacttatagaccagactccagagagggggcttagataagggatgatctcaaaggttgggagtaacctagcactgtatgactccagtcatcaccaaagattaaaatcaagacacccccacctctccaccaccaccacacgcaagcatttcacttacagagctcaaatagaacttgacagaataaactcaaaactccaaactaaatcaacaactgaatactgggtaccaagttgtagcatccacgcatatcctacagtgtggtggacagttagttagagcattttttccaccttatacttctttctcaagctacagacaaaggcaagctcctctttagaacttgtcccttggcctttggacagacttctaaaaaccctaatacattggtatgcacagtccgtaacaattatcctaaaagactctcaaagagtacgaaaggcaggcactgcagagtttaacagcccaagagccaatcgtttttctaatcattatgaccagtctcctcccctctaaaacaaactcagcaatacctccaaaggtattgctaagatgagttagcttgacttttaccagtgatgtaatagtattagcaaaggagttttaaaacagtaccaatactggagctggcatgataaataatgtctgcaggatagtatttgggaagctgagataggggaccaagggactgagtttttggccagcctgatttacatagcaagactcaagataacaacaacaaacaaaacttctatagtggaactccacactcttgctgtactttagtttggaattacaatgaaatgtcaatgtaatcctagttaagacctgaccaagcaatgctgtaaataagatgtgcctcctttacgtattttgcttgaccttaagtttgtaaaactaccctcattcttgttgattatttcttagtgacagctgaggatatgggatgggccaaggtcttatttcattggtattcattttatccctgggtatggaagagactagcccagtgtccccgtatactactgttgactatgtttaatggatgtgcctggaagttccctatctatgagcagcagagacctttgtcttgtgtcttgatatcacctgccctatagttccttaaagcagaaaagtagtgcagcctgggccaatcctgtagcaaattcaatttgatgaagaacttgtttcatttgaaaggagggcatgttagtttaacatagcaagggactctggtggagtggcacctcaacataggacaaagactactttgtcaacattagcgtttatactcattcaaattgtttttcctggcattgctgaaaccgtaataatatccttgtttttggttttgtttttttggtgcatggtaaatggtaaacagcaaatgttattatctttggaaatatgtagtcaagtatcatttctctcaaattttaaagagtgatttaagtattctatctaaaaagataaaactataattatctagtgaatttcacggtgaaaattttttaaacgtcttccaacaactttataaattagaattgagaattccccttgtagaatttaaaacgaccagcagagggcagagctgagactaggatcactgactccctatgcagcaatgaggaaatctccaaaatgaagcccagttctatttttgactgaaatatagcacctcagttgccacattggagggcttaagagatcatccaagaatcatcctttcaatgtaatactctcttcagtacaaatcagagacataggaatgaacactgaaataaaataatgtaatataacataaacagaataaagaaatgaagtaatgtaacattaatagtctctcattttatgcacattcatgggtacaactaaatcacttcaaatcaaatcatgcttagtatgtataagattttaaagacctgtaaaatgtataattatatatatatgcattgtatataatacttaatctagaatatatatcctatagacaaagttattaaaaaggcttgtttgaatgtttgatagacaaatgattatattatcaccattttaatatccccaacttttatcatttgcaatattttgcatttcaaaagtatgcttcaaaataacacgccaatatacagatataaagtaagaaaaaatagggctggggagatgcttcagaggctaagagcaccggctgctcttccagaggtcctgagttcaattcccagcaaccacatggtggctcacaaccatccgttatgagatctggtgcccgctttgggtgtgcagatacacatggaagcagaatgttgtatacataataaataaaatttttttaaaaaagcaaaaataaggaagagttcatgggttaagcctatgagcacagtataagttgaacaggactaaatttggtcttttcttttttgaaacagatgagggttttttattattattcagttatatagatattgctgtttttcaaataagaaagctgagaggggcatagagtgtagctcaagagagagagcttgcctagtgtgcaccaagctgagtctcattcctagcagcacattaagcaggcccagtggtccacacctgtcatcccagcactctcgggcaaaggtaggaggatccggagttcaaggtcaactttggaagcacagcctgggctacatgagaccctgtctcaaataagaaatagcagggggtaagagagaaagggaaaaatgaaagaattaaatagaaagttcttaaaataaaggtggtattaattccactgagattggaccccatagagttctccctctccgccccccattttctcccttcttccttcttcctctctttcactcccagccactctgctgagaagtttctcaattatacacaagaagttaaccgaaattaatgagcaattcagggcaaatgttccatcactagactaattcctagcacagcatctcatcatctgaacataacccttgggaattcaaaggaaggacctcctttgagctaaaaggaaaagggccaagaacagcttccacgtctaaataacagcttgtatctacagaacacactcttgctggggcaccattttcccaaccccagttgatcaaatacccattctcccagggccatcctcagagctgctccatgttttgtttttgttgatgatttcctaaagtgggagcctaatagtcagcattttacaaagcccctagaagcagagggaggaggggggagggtgcaagcccagcaaagcagcagctaagggagacactgagggccacagagaaagctgtgcatatcctacagtttaagcgacccaccacagaaaactagacccacaatgtttgttttaaaagtaatcatttggagctacagatacatgtcagtggcatagcacttgacaaaaccggcaatgagagagagagagagagagagagagagagagagagagagagagagagagagagagagaattcttttatagagaagaagcaattgtcgagaacaagaatagcaacctgaaaactaattagagattattgtgtaggcgctggcccaagacaaaagtaacacacaaaagaggactggcagggaagggaacacaaccaaggacatggtagtagatggtgaaatgtggaaggtgactgcttcttgggctgaaattagatgtctgtctgccacttctaaaactgtgtgactctgggcaagtcattcatcctttctaagtttcagtttttacaccaaaggatgaagtcagtttaaaattaaattgcaatcggctaatcaaagtatgataaaaatatctgtcctctgtaaatgctaaggttcctgccatgaagaaacaagaaacgaaaagctgtgtttcccacacttcttcacttattttgccaccaaatacacccacattcattcaaccgcattcaccatacaaaccatctgcacaccgtccacctcacctcactgagcaccacccaccaccagtgtaggagaaactgtggccagtctacccaagtggcagtcaccctgtccctggtgcccaggccagcccacatgcacagcaggcatttcctccctgagccaagcctccaagcctacctcaatgcccagagaggctgacagagagacacctgacccagagacaccaatgagaaaaggacatacagcagagtcagcgcctgagccaataggacctcgggagggggtataacttcctgaacaaatgagtctgcagcagctctactactcactgactcctggtgcctgagaagttggctctgcctcttttcagcccctcccccaagggtaacccacaacacaccaggacttcacagctcatctacaaagggacttcaaaactccactctgtgagatagtcccttccagagcataccctccataaataaattgtcaataaaattagcaacatagacaaattgaatgggtgtctagcaattcagaagtaaatttgacataaatttgtcaaaacagctgaaatgaagagttactcttctaattactaaataacaagtaaagcattctactccccaacatatgcttcttagaaattacattggcctagggaaataggtcagtggtagaaagcttgtcagcatatgtcagcatacacagaaccctaggttagatcccaataccaggcaaacacaaaagcaaacctgaaaggcagtacatgaagaccactatatttcactttcactattcacacttgagaggactgatgacccctcaagcccccacagtgcctgggtctctggagctctcctttgtccccctttgacagtactaaggattgtcccctatgctatagacatactcaaccagtgcttagcactgagctatataccagcctagaagcaggtctttcaatagcaagataaactgcacctgtggtcattataaagtttgcaactcagtatttctgctttagcatgtagtgtggcttctacaacggggaatctgaaatcacttcatattacagtaatatcgtgtgcatttaaaaatataacagtaaaaagaagcagtttcctccacagcatcctcaggccaggggtcttagaacttgctcagaagtttctcccattatctacagtaaatcttaagaaaacactacatatatttggtaaaacatgaagcagactctgaactgttcagtccattataatcccatctgtgtgaaaatctgattgtgaattagcaactttaaaattcagaattccctgtgctcacaaccttggatgagtcatcagtaagcccaggacaaccaagggcttcatgagaaggctctaagaacagtggccatgttggacttcagcattgctagccaaggctccaattccagctgtttctgcctctctgagctgagagtaaacatttatgcagaactaaagttcagcctcagaaactacaagctccttcttttcattctacatctgctctcacaaacccggtttgatgatgtcactgaattatcatttcgtcatagcaaagtgttctgcatgaagatttcttgaggtactaatttaatcccaatccagtctcttcttaggttgtctctcatctttgaagctctaatattttcttggaaatatctatccttttccataacactcgacacactcaactgagtcacatgtcacataattagtttgtgaaagaaatactcattacccaacatcccttgatggatgcacggggactgtgaatcaagcataacagaggaaagttaaaatctgtttcaaatggaagaagggtcttccctcctctggtggaaggatggcacagaaaattctggctctcagaaagccatctcccccacaggaagtcactctacatttcaaaatgcaagtgtccttatttgatagattaagagaattgggctaaaatatatactaaccttctcttcaattatgatattttatgaccccaccacacaattaaaaattaaaaacttactgcatagacaaatgtctttaaatagttaaaacagaaaactccttacagtaccgtgagaggtctgctagtatgaatctggcaatagcacaggttcaaaaccattgtgcatcaatcgggctgcaccctgttctaagttactccatgcagcatgaaacactaacagttacttattactactaatcgttgttatgcatgtgccatatacaatggttcctagggggagcatgtttgtgcatggagtggggagcatagtctaccaagggtgtcttccttgattatcccccacttcattcatttttgagccagcatttctcactgaacctgggtctcactgattcagctaggtcagtcagtaagcttcagggatcagggctggctgtctccactgtcctaccattatccccaattctgggctttcaggcaaactagcacacccaactttctatgtaagtgctggggatctgaactcaggtcctgtttgttattgccctgagttagcataggaaataacaggcaccactatacgtcttcattcatagatgtcgttagactttaaaataggggcttttagcctgtgacttacccacgtggtgatttcatatcacaaggcagtacttgactccgcttggagtggactccaaggagaatccacctgccaaagcaggattctacacttccattgggcaaggaagtgaccaacactggtccagcacacagcacaaagacagagcttactcatgcacctgagaagtatcacctgtacacctaagtcaatagggaacacatggtataagaatgcaccaaaaccacaggagcagccatggtggtggtggacgaatttgatcccagcactcagtagacaggcaggtggatctccaagagttcaaggacagcctggtctacagagtcagttcaagacaggctcctcagagaaaccctggctcaaaatcacactagatagacccacaaaggatgagactctcacccatccacaaaagccaaacactgggcacagtggcactgatgaacctgtcatccatcatccgccatccacccatcacatgtgtcaaagggttaccaggcaaaggactccgatttcccctggtcttcagctccatgtggtctctattgctctggggacccactcagatgactagccctctgagcagaccgaacccatgagcttcacctggacttgaccttctgccagaccttctgccaatcttctttcagctggctcaactttgaatgtctccagcagctctcaaggggaggtccttaatatcttaccatgccaacaatagctctccccgtctcttactctgcctttgcctccactaaggcatctctgaatgcctcatcatctttaacctctttgtagccattctgtaaatatttgttactgtgtgaagcctagtatgtgacctgagagtgagcattaatatttaagattagaatgaaaaaacctgtgatggccaacagccactcaatcaggtaaaataggaagtacatggtaaatagcaagcaaggaagcgcatgtggctggggaacttactgttagtcagcaaatcctgattttgtggaaatgcatcaatgtctctgacacagcacacccatgccagtgtgcaacacagagaaatgcattcagaaaaatgcctcccaaagcattcagctgggaagctgttacgtatcacccgttctgtgtggtggtgtcacaaatagaaccctataaacaccagaaagatgcatagctgagggtgtggttaggggtacaacagaccctaagcaagaggaaggccctgagttcaaaccccagcaccaacaagaaagacaaaatgcactaacagagaagtcactactctcaaggaaaccaccgataccagcagccatttgtatggatacttgggcatattcaacaaaaggaaaagagaagaaaatcatgaaggaagagttgggcggaatcactcattttaataaacatccatcacccacaatcacgatgaactgggaactaccacacactgtgtgccaaacgggtgattcaaagaacaagttctggaagccaaaatgtgtacccagaagaaagaagcagctttgtttctgcactgcatggatctgtgagtgacaagttaaagcaagagatgcccagaactgcaaaaatacctttggcagatttgtgctgacaatggacttcaagtaggagaggccaggagcataacttcaatttcttctctaaagaataaaaccccctcatcaagcccattatgaagattaagtgaatacttgcaaggaatttacaagaaagcctggcacggtggcctcaatatgcttttaaagattgaagacagttgtaagcaccaagggctagcatgcgtgaagccctggattccaacaacaacaacaaaaaccccccaaaaaaccacacacacacaaaacaaaaaatggacagtgactgggcactgtacggtctgaaaattgaggcaaggttagcaataatacatgctctgaagtcgggtgttggtggtgcacgcctttaatcccagcactcgtgaggcagacccagcctggtctacaagagctagttccaagacagcctccaaagccacagagaaaccctgtcgggggaaaaaaataaaataaaatacatgctctgaggaagaaaggaaaacatgaggtagacatacacgccctctctacttcttgcctcctcctgaatgacccatctgccttgcaatcattcctactgctacagctgtgagcaaaacccttgccacaactgcacagggcagtacggctcacactatggggcagagcagacagaagtcacttcttgtcagatgtttttacacagctttgaccacatggtgaccattgctgcttgacaaagttccagcattttgatattgcagaccacacttctcctgcagccccccccccctcaagacagaacttctatggagcctggcctagaccaggctggcctctagctcacagagatcagcctgcctctgcctcccgagtgctggggtcaagtgtatgggccaccattgcctgactttacttttattttgaatgattctcaatattaatgcctttcctttcgggaaattttctatgggctttggtaaaggattaaaatgtatacactgatagcttccctacacaaaataattcttagggaaaaaaatcccaccactctggaaccaggaattccaatgtaccctcctaatcacaccaagaaaaggggagttagacacacctgatcccaaggatgagatgcctataattcagacccagagcctgagaccatgaaggacaagagttacagttaataaatagagaagtcagagtggtccggtatgacgggaaaagagtaagacatcaggaccttcccttctgggagagtttgtgaggggaagaggcccacatagtaagattaggaaattggagtatagtgtctgctccccagcagtctttttcccaagataaggcttttgcataagggtttccatttcctggggggcttaaggagagttcctgcttgacaaagcactcaatcttctctctagcaagaggaacttatgaccctttcattaatatatgactgatgcctattgtcaaggtcaaggctagcttcctcaagccctgacctcaaaccacaccccagctgacatgccccttgcctcccatttaatcctgtgtgcaactatacagtatgaagggtataatcttttctcaattagatgctgctggcggccatctcaattcaccctcagctcctgtttcctccccaggcccccagcatcaactctccacatcctctctgggacccaaacccctgctgaagcaggtctccctctccagcaattacaacaatggggaaatggctaatataccttggaagatcaactcaagatcagctttgccagacacaaacaagcccaggctggagacaacctctgccactgtctggctctacaaaagcctccttctgagttctattctgttctcattccaaagtttataatgaaagacccctgccccttagccctttctttctcaagtttgtctcctcttcctcctgtcggcggcttccccgatccccacccccggcggccttcccccgccacccgccgcacgccaggcccgagaacaagcaccaggtgggccggcccgagaacgagcaccaggtgggccagcccgagaacgagcaccgggtgggccggcaggagggcgagcaccaggtgggtcggcacgagaacaaacaccaagtgagccggcctggagccctgcccctgagcccccgcccgaagagaaacactctgtcccaaggtctccgcccccaaggtcagccatctggacgcggagggagggggaattgagtctgttgtaccagacaccagaccttgagaatatgctgatctggaatggctctgtgtctcatttgaaccatccaatagaaatgattctgtatttcgcctcatttgaaagactctatgtttcacctcatttgaataactctgtactttgcctcatttgaataaccctgtatagcgtctcatatacattgaccaatgagaatagctctgtacaatgcctcattagaattatccaatagaatccctgctcctagcttgtgcctttttccctatataaggacccctttcccttggctcggggcgcttggcctcacagaagctaagtcgcccgggtacccgtatctccaataaagcctcttgcggttttgcatccaagcttgtggtctcgctgattcctgggtgcgggtctccctctacgaaagtacctctttgggggtctttcaataatgcccaaaggaaaggtcttcatagaaaccctaccctcttatcagcctgctcagacacctaacagagaatggagggagcccgccctcagcttccagtcacaaatatcaaaggatggctgcatctgtgcccttctttgtgctcccccatcctgttcatttccatagccatcttttataaagtacacccatgtagcacaaattctaattggtcttactaataaaaaccgggagtcagatctttcagttaatgctgaaagatcagaaaagcagagcagccagccactagttcttacctctactgaatcctccaactaaagagaccaaagcatccctgcaaaccctcagactgaatgctctgagctcctggctcctcctgccttatattcctctctctgtctatccacgttactcctgtctccacttccctagtgctgggatcaaaggtgtgagctctgtttctcttttacaatggatcaatctagtatagcccatggtggccttgaactcacagagatccatctgtctctgtctcctgaaccctgggattaaaagtgtgcaccacccactagctaactagtgtggctagctccccactctgatctccaggcaagctttatttgttaaagcacaaacaaaatattgccacacacctacatttagatctcatcttttttgactctcagaactaaatgagatgctatcagtctttaatgccaatctcctcggtccttaaccttacattctttattgggtcccttctatgcctcacctccttatccccagtcctccatcggtttctaaccgtgaacactcccctctaaaggaaaggcaagactcacagcaggtactccgcttgtaaactgccccaagtttctttacaatacatattttgtgactctctggttagagagagaaaagtcaaattcattgaataaattcaccttcttaatattacctgagaatacaccaagagtcacccccacacctgagaatacaccaaccgactgcagcatgcaagccaagtctgtgccctctcccttcacctcctcctgcaaatggaagttttattaggcaatacagccacatttatagactttgtattgtccgtgtaagtcatatcaaagcaggactgaatggcttgacaaaatgtgtcatatacttcctaaattctaaaacactacctgactctttacgtaaaacctttgttatctagacactaaaaaaatacaataaatctttcaggtttccaaaatccagtaaggtttaagaaggagatcctataagctcctcactgcgttggttgtgttctcagaacaaagcaccttcccttggtcactgtgtccccgattcttccctttagtggaagcccagtggctttaattagcacatactgctaatgaaaagaaatatataagaaagagacacttcctttacacagaaatgatggataccgaggcatattcagcaaaagggaaggaaagaaaatcatgaaggatgagttaagctgaatcactcattttaataaacatccatccccccacaagcacgatgaactgggaaccaccacacactgtgtgccaaatgggtgattcaaagtacaagttccggaagccaaaatgtgtatctgaagcagcatggtcttttcaaatgagcaaacacaaagaaagctcgtcactgccttagaaagtgtatccccagtgtgtctttttaaagattccgttttaaaaaaatgtttagttagcatacaaaataatgagcttcattatgacacagccaggcctcgctgagctgtgtcatacatcattgtactttgctcaaatccaccccttaacacttatcctcagtagacccttccttcccactcttgttactcttcctccccacagagtcccttctgcttctatgtctaatatacttatataatatcacacacacacaccacatgagaaacaatgtgatgtcttcctttcctttgtgactctccttatcagccctgcccatccctttttgctcctttttctctgcataaacttctctgcaactttcatttaaaaaatgtacttactttttaaacttcattgtgtcaacttcagtgaactcaggtttggggaccatttctccatccataccagtgctaaaagcagcatctccactgagcacagaacatggtcattaggagggataacagcaactgccacactgtattcacagtactttttgctgttgctgttctgggatggatcctactaagtagtgttcatacgctcgagcctgtaggggacaccttacattcaggccacaacaatcaggaacctgagattggttgtaagagaataccgtacactgctgggctgcatctgcctccttctggtatgatcatataggatgggtgagtatgaagccatgctgtctcatgtcatcacatgatgcttcatatgatcacctaagtcatcaggctacatgttctttgggcacatgagacttcacacatatcagccatatgcgctaccactgagttactgtctttactctgcagcaatacttctggatcgataataacaggttaaaaaaaaaaagccttctctccccccaacataagattaataaaactgcatatattataaatttattaaaacatgtaccatatcaaaatattcttttctttaaggcaggtctcacaattgtaactcaaaggggactggaatcacactgaaactcaggctggcctgcaatagagggcaatccttcagtctcagcttcctgagatttcaggcatgaaccaccacacctagcttaaaacattcttttacacgatcatctcagaagtaaaatgtacatattaatgactacaggatgcagtcatataagcattcctgagtggtagatgaactaattatagggataaaaagaaataccactgtttcccacactcagagaaatcagaaaaatgacaacagataataaaatgtagttgtggcagctcaagcctaaagtcccaacattctgagtaatctacagcaggaagattgtcacaaactcaaggtcagcctcggtgtactgggagttttgtgtgtcaacttgacacaagctagagtcatcaaaggaaggagcctcagctgacgcaataccttcatgagatccagctgtaaggcattttttcatttagtcatcaatggaggagggcccaccccatggtgggtggtgctatccctgggctgctggtcctgggttctataagaagatgggttgagcaagccatgggaagcaagccagtaagcaggatccctccatggcctctgcatcactcttgcctccaggatcctgccccatctgagttcctgtcctgacttccttcagtgatgaatggcaatgatgaagtgtgaaccaaataaaccctttccgccccaacttgctttttggccatgttgtttcatcgcagcaatagaaaccccaagtcactgggctatatagtgaactccaggctaatctagcctaaaaggcgcttctctctctctctctcactctgtctctcactctgtctctctgtctctctctctctctctttctctctctctctctctctctctctctctctctctctgcatttgtgtaataaaacatataataaagtaataaaggtcttccactttacgctgattactgatgcaatctgatatcctgcaatgcatttgtcatcataaaaagttactaatacagggcaattttttcccaatccagattatgtgtacttcaaagaatgaagtcaagttgagacatcttgatacatgttcacatatatcccttaaaaaataaatgtattttataatttaaaatgaaattggatagaaaagtggttcttgtggaaaacagtaagcaaatttcttctggtggatttttattgactactccttcctactggcaacacatcccctctccccataatagaattacatacctaagagcatctaacttcccacatagtagagatctgtgaaagaaaggaacaaggttatgtaacaaatcagtctgcagtcatttggggttcctttcctggtgttaacaataacagataaaataactatctttattctttggtgaagcattattttaaaaagaaccttttgttcctccatgctacatcctctatagagaatcgccaacattcacacacacatacacagagagctaaatatcacagtcacacttgagtataacacttctgcagaaaaggacagggaaatggagtgactatggaatggtcatgaacacaacaccaggtgagcataatgtgctctccttcacaacttttagttacttccctgtagttcttcctagtcttttcacttccataagaaagagtagcaatgaaaaacagaccagatacaaagccaattctcatatcatataaggctcaagtccacattccattgggcattacatctctccaagtgttttcatgattactggacataagtaacatttgatcattcaaggcaattcactgaatggatactctagttcttcatatcctcagtaaccttcctgttctgcacaaagcaagacatacttgtggaatggctcagcaagtttctagaagaatttaaaagacaataatgtaaaatagcataagccaataactgtgttaaatgctttataacttaagctcatttagtgtttcagacaattctcaaccaagataatattatcactgaaaaattttaatgtgatcctggataaacatcatctcttcctacatggaagaaaagggattgaaatctaagtctagagtatgcgcttaaccactctggagatgcctataaagtaaacacagtcatacagctcaggagaataccttcacacaaattttgatttgcatttagaaacaactgagtgcagaattaattataataatgttattataggacagttgcagatatgagtggacaaacacagtgactacaggggtagcatgtaattctgaatagtgtcccgagagaaagagtagaactggggctgaagagatagcccagaggttaatggggacactgcccttgcatgcaccaaagttcagttcccagaacccacactggactgggcaacccacaaccaggagatctccagctccaggagatctgactcctcttctgagagtcatgagcaagtgccctcaagtgcacatacccacacaaagacgcatatacacatataattaataataaaatattatcaaagtattaaaagtttacttgtatgggcagattgaagataagaagctgccactaagtgacacagtgggtgagcagccataacaaaggttagactccaatccaaagcaaaaagagtagaagggtgtcatcacagaggggctgatgggataactaaaacacacagagaaacaggagatcatgcggcaagaaggaatgggcagcacatgcctccagctactccagcaagtagccctagccattgctccctatcaaggggaggagacagaagcctcatgccaaaaaaaaaaaagtctgattggcccactgaaagagctgaccatcctacataaaggataagatctgaattctcggaagcctgaaatccagcttgaggatttcttggatcagtggcccctcttatgtaaaaagtcaacactggagagaagatccatgttgtcattcttcatgtctcactgggctatggaggggcaaaactttgaaaacctgttgcttaagtctgagctacaccgggcacctcccaacaagaagagatcacaattcagagaagtggggtcaatctgtcacaactcaagagtgagggacagctgaagaggagtccctaggagagggatgccaagaagttcaggtagtagaagatgagcacatcaatagtgaaaggtaggtgcccattagtcccgctgttggtaactacgagctgaactcatcacagtggagcctcactgaactccgactgaggtcagtattggtcactgaagccagccatcttccgtgatctccagggataatgggcagaactctggcactccagcagggtctccgatttccatagcctcaaccctacagaaaggattttaatgttgagtgaaatttgaagtcatggagactagtcctcctgggcagatctcagtgctgtgctagtaatccctagagatggaagggtgatagaacatgcctcacccacaggctacaagctaagtgtggccagcagaggctcctcctacccacctgcatgcggttttctacccaatggccattggcagtgtattggttggctatcaatgtaagcgtacttctctaccttgtttagtcttgtgttttccttattgcagtggttttcttgctcttctcccagtgtcactggggattcatctctcaactgtaggctgctcactaagaagatccccaaataaaatcaaaagtgatagccatatcaaccaatacacaaatcatccttcagaaaatacagagagttgaggatatggctcagtggccaaatacttgcctcacatgtatattatatatccctaaggtctatccccagtagaacaaaataaaaacatacaaacagaaaaaaatccattcaatgaaatgatgtaaaacctcccaatcacaattgtgctccaataaacagtctcctgtttattgaggagtctagaaagtctcatcttgtcttcaggatcttatcaaggaactatgacctgaatacatttgtaaatgtcaaccaatcaggaattggcataactgaagtccttcatgtgcataaaattaaccagtcaggaccaagaacacttatacacgtcacttatgtagatgggccagagtggggaactgggtgggatctttgtctttgccacccttatctttgtcctttctgagtgcatcatccttttgtaccaatggccacctcctcctgacttgaaccttatgctttctttccttcataatttttatttattcttaatgtatggccttactatatagcccacagttgccttgaactcatgaatcctcttgctcagcctctgaaatgctagaattacagaatgtcattgttacttttctattcctgtgaagacaccatgaccaaagaaaattgagaagaaaatatttaacaaagggcttgcttatagtttgagagggtgagtccatgttttcacagcagggagtgtggcagcaggccagcaagcatggttctggagcagtggctaagagcttgcatgttgagaaaacaatcatgaggcagagagagagagagagaaagagagagagagagagagctgacaggaaatgtgcttttaaaaccttaaagccctcccgcagtgactcattcctcatgttttttcccaaacagctccaccatctggtgaccaagcattcagtatatgaacctatggggaccacccttattcaaaacaccacacaaaccactgacctacacccatagctccccctcccacctttggttgttgtcttaataaagctttcctttttacttgaattattttatagtgaattttattgatcctggcacataggataaatttccttagcatttgtaaatgaggtaacatggacactcaaaactacatgtgtcttacaaagttcacaaaacctttatcaagtaatgtgagtggaaatgcgatgtccttttatattttctaaagcacaagaaatcaaaatggtaagccctaaaaagatacaggataatgtagcgtgaattctagttggtcttaataataaaagtccagacacagatattgggctgaagatcagagaagcaacgagttctcacctctaaccatgtgatccaccgaacctcagattgctcccgactgcactgctcctcggactcctctgtctcaaccaaacctcagacccactcagctcctgtctcctcctgccttagattcctctctagtgctgggattaaaggtgtgggatcctaagtgctgagatcacctttgtgtgagctttgtttctctttaagaccaaataaatttcatgtagctcagtgtggccttgaactaacagagatccatccgattctgtctccccagtgctgggactaagggtgtgaaccactaccgcctggcctctattgataactagtacggctagctttgctccctgatcttcaggcaagctttatttgttagatcataaacaaaacatcaccacaggaatataagagactaacacgaggaatctttagctgaggtaggtcaagtcctaaactccatcagtacgattccccatatcaaacaataaagggtcttttttttttaatgacatatctaaacagagacaggtagaatgctcttataagatcagtagacaggaacaggtacaagcccagctctactgggttccatcttggaaagaactgtccctgggagaattgttccttggagatgctcacaacaaccctcttctggaaatcagcacaaagactatcaaaaatgtctctccccacagatgagcacattccttcccagcccccactgaacctcgatctttacaatgtccagtatgtttgcttcctttgtagtttgagaaaaaaaaaaaaaatccttgactcagtattcattaagccctggtgctgtttctgatctgctattttagaatatggaacaacagtccccatgagagtacctttaatttcttctttgttttgtgttcatttggtgccaggactagagaggtagtacacagccaaggaatactgccaagaggaagatgatcgcgtcaagctggggaatgaaatccctactttctgtgtttggtttttactttcatgcgacacatggctaaagaagcattttaagtctctccaacgctagggtggatggagtaaggtgacaggtaagaagtaacaagtttaacttaaaaagaaaaaggtaaatgctgtgactcattggtagaaccctttgctggcatgcttggggacctgagttttgccctagtatcccaataataagtaaataataaaaacttttaaatggaggaatagggttatcctcttcttttcgtcttattccaatttcacacttgctaagtggaaagacttttaagttctgagctttaggaaaataaaattaatttgataatagttttcattaaaaagcaagtgctagactattatgtgaacttctccagggacaatatgaacaaattcactcatccccgctagggcaacaatgacatatcaaagtatcaattccatggaagtccaacatggcaaaccagtggccttattgtgtgtatttacagatcaagggcgaagggtggtacaacagggtggatgactccccaaacagctataccactaaagtcacactctggcctggatggcaacttcccaattactgcagaggtagagtcccccactccccattccttcaattaagcttccatatgccatatgttctagcacctccccagactacaagaccatgtgaagctcggatagaattacatacaactgagaagagtggttgaaatctccagtaagagtatgtccccatccctacccccttctcttacgagggaacatcaagaggctcgatcttgagggtgcaggcagtcacagctgctctgatgaaggcagtcatggctgtcagaaatagacgatagcatgcaatgcagacatagctagtgtttccctctattttattgtgtttaccatatctccaaatttccctactgatatctaccagaaggtagctctacaacacaccacactgtagtcctcaggttctgtttccagaatcacacagctcccacagagaagagaagctttgtaaatcatctaattctttccataagagagagagagaaaaaaaaaactttaacaaaaataaatcttaaagaaggtccacaagtcacggcatcatctagaaatttttctaacagacgagaactgaagtctcaggatatgttatgagatttcttctcgaaagaccacaggttagaattagtaaatggaaggaagaagaaagcagcaatcatggacgctctgttatttatgatcaccttttcatactctggttctggggacaaagcctcactgtgaccctcaggctgtcctgaatctcttgatcctcctgcatcagcctcccagacactgggatgatgggcatgagccacaatatctggctctataaccagctctagacctcagcttctgttcacattccctgtcttttgaaggatgtttggcaatactggaagagatgtagttagccatgtgatcagaatccaatgtcctcaaacactcagttcctaggctctgcacaagagatccaaccagacccccccacacacacacacacagctttctcatgagagataacacatatgagaactcttgcctatcttagttctaggtgcatgcttctcagaaccacgccaggcatgcaccacatacctgagaaagttagtattctggcttgacgatgctagtccggggcagtgctggcattcatgatgagttatgaacatgacttgtgtgttccacactattaagtcctgctaagtgggggactgggtgagggcagagactgctgcttcttcttgtcaacgtttagtgcacaaatgagttggggaaaacacacagcattctagtgcccatggaaacctgtgacccattgggactcgtattttaccctttggtgaagcttctaatggaatgtctgtggccagcacagaaatactgaggtgtgaggtatagttcagtgacaaactcttgctatgcatgttcaatctccaccaaaaagaaaactgctgagagctcttaaaataagccctaattagaacaggctagaaaactactaagggactatctggacttttgttgttgttattgttgttgtttaaaaggagctttgcaaactacatccaataccatgttctaaagaaaagtacagaaatagacaaactgggcccttgagtggcccaggggaggaaggcttgcatcacgtgttgtttttaaattatagggcaattggggcagacacacatcacagctgctactccatctgcagtccaccccacagacagaagtggattctcctacttacatcaaatggagctgaacttgacccagcgttctgattacatggttccctgaagcagtcactgaaaggaagtagaaggcccatggcaatgatccgtgagcaaaatttttctgcttcttctggaggcccgttctcctgctggctgaacagtttctccaacagagtccgccctgcgtaggaaacaaagtcattagaagggagttggcagatcacctggctcagaattctccagagagaggatggtaaacatcaccagggagcaacagtctccagggctacttgtgtgaagaaagtatccaaatgaacaaaaacagcaggatgtggtcagacaccacaggaaaggatgcaggggtgcactctcccaggttcccaaaggcctctctctggcctcaaaagacaataaagagcgttactgactatacattctgcacgtgaaaggaacctccaccccttggggatttaattaagcaattctcctttcttcttgtttaccttccaggggattctctgaagtagtgagtaacccaaactaccatcatttgggcctagatatgtcagagactgacattcaccatctcatacccagtactagggaaaggcagagagtgaggcataagcaaaggtatcaatcagtccattttttaaaaaaaggcaagaaagttggccagaaaataaaagtcaccctgaagaggaaaaagttacaagtgttttcagttgctccatggaaacagctatgtgtggggtctggaaagaaggctcagtggttgatggagcttgctgcttttatagaggaccctggttctgttcgcagaatccacatggtggctcacaaccacccatggctccagtttcagggaatcctctttcggcctctgcaggcactgcacacatgtgacatacaaacatagatgcaggcaaatcacccatacataaaataaaactgaaagtctaaagaatttctaaaacaaaaaccagttctatagaaggtctaaaatgtaaatcttttgttatttctccagagaagagaagtaccattaaagagggaggatgcagcagaaggggagcttctagaagcatcaagacaggcaaatggcaaaacatatggaataaatgtctgtggactactcagaaacaaactagacatctatactatagcccatccctgcaatttcagggaacatcaaaatagaggagcaagagcactgtaagagtcagaggtcaggaggactagcataaatcagtgtcacctagtgatggggaatgtactgtgtatgtttatcttattgattgttaaataaaatactgtttggccaatgagacagcaagttagatggaactaggagtcaaagaggattctgggaaatgtagtagagaagtggtgatccaggcaggaagtgacatagcaaggagactcatatttaagtgaaggagaaacaggaagggtcctcttttcccctcctctcctgctccagcagcacaatgtgatccaccggcaaggagggacgccaacaaggcgtctgataagtcttataaaatatataggtttatgatagttaagactgagctaacagatgagaagtcctagtcattggccaagcagctttgaacctaatacaagtttctgtgtattgatttgggccctaactcaggcgggcggctggtgtaaagctcactcatggcggtggggctcaggcggcttttggcagaaagatttatcataacaacctagggatgacagtaagggacagctgtactcaagaactcactgcagctatggttgccttcatgacatcaagtcagtcagtgttccagcaaagatagcaaagagacccgatccatctcctagaagctgccatccgttgatgcctgctaagggggacaggctcaattttctttaggaatgtagtccctggaagactgaccatgctccacactcttatgaaataatcaaaatatacgtgtgcatgtatgaaattcggaagaaaaactaaaacactgtaattatgaaaagattgacaattgagggaaccagtggaagagaaaaactggaaaccccaatgaccatgggttgtatgtaactaaacagcagaaacagcaaaagctataccatctcaaggtactagagaaggtgggtcctgtgtaaatgatctagaaaggatggatgctttcatggttcagggccttggaacccagaatctctctaggtctcttgccccctcattcttctgagtgcccccccttctcttccttaataaaccacatctaattctattgttctctgtgcttccctggccatgctctttctttcagaacacaagttcctgaaaatccacatgtgtaccctctggtcaaagcctgtagctcggtaagatattagcaacagaccctagaagactaggtcctcctcctggtccatgcctagaccttccttgtgccttagaatcatcttagaagaacaaagtgattggcaccactacaccactggtcactatttgagtctaaagatagacaggcatgagagtcaagggtccagtccttgatgatttttttaactaatacatagagtactgttctggtgagctggatgaatttctgtcccaccctaatcttatgtactattgagaacagacttcgggtcgaccagaagttcctcttcaggtggactagaaactggttggactaaagatagctgcttaagtgtcagaccactttaaacttcatcatactcctttgtgtgttaaatggcacgccctctagtgccacaacagttgacagctgtcatggcagtgactagaaatattataaaaggagagaaaaaattgtcattcaaattcctagaaaacctcttacaagatccataaaagacatgaatatccctgtctttattcacctatgcctccccttcacttcttttatgacttaaataaagcctctccctcctaaaggttaagaattgaatttgcaactttatctcccctttcaaattgtggccaaaagtaaaagtctccctggctccccattgggcacctgatcttgttataggttccacaattctgggaaataaaaaggatccagtttcaggtcaaaatctaaaataaactcttagcacaccaagccttagaaactcagaaactcatgtaacatttgtctatatctgcaaactatagcagaaggaacagagaaatcttccagataccctccaagtcacaactgtcttcagttcttgagtctttttgtccccctcaagaatttatctttcaactttaaaccaaaaacaagcatcctgaaaaccttctgtgagccccttcccaccgttgtagatccctctataaactctttcatgttaacagaccgttttacttaaatgattatgaaatcttttctgtttaatatctattcctttgctgaagtcatacatttcatgaaagcaatacatagcctggaaatctgctaacttgaagcaggagataaatacttggagaatgtctagaagattattgtgctactcaataattcatacttcttcatattctagtcagaatatgaaaaggaatggaacacacacatactttcttttgcccatctgccctactgtaatccttttaagataccacttggcattctaaatttgaaggagggatgtcagattaataatacagatgttaactgctacatggcctttctttaaaactcatactacctggtgacctctgcagaacttgtactcattctttctcattcctttctgaagttctatggttaaatagcatatattaggtcatcaattagcacagagcatacacattgatttgaagaagattagtatttctgaaaagaaagtgcaaagtgagagttgagaggaggtggaggctttttgtaaccttctgacaaagacacagagggccctcctagaaaaaatctcccatccctccagctcctgggcactgatcccctcccaagagccacatgggcccactgagaaagactgtcccccatgcttctggctacaggacactgccccctctcctatgaacttcggcatagagacaatccctttctctttccaaacctagtttttgaatgaagtcaccactgttgcctctcaacactttgcctctcaacttcacgggcttcaacagacagaccttagttccataaataatggcaaaccctttagagtggctagttggatattaaggggcttagattaaagatgaacttttctctgctaactgccagcttataaaacaaaacaaaaacaggattatgattgctggtgaaataaacagggtctcactaatatatctggctttgagtgtggacataatattatgaactctatatcaccagttgataactatctaccttacattatcactttctaacagaaggctttctggtactgtccactccttaggaatctatacaaataatcctgtcaatcacctggacaggaaaacaccctttaggacaagctgcctgttttagggtcttatgaactagcacaaaataaggcacagtggcacatgtctataatcccaacagttgagaggtggaggcaggagaattagacattcttggctatccttggttcaaaccgagctcaaggccaaacttgtctacatgagacgctgcattcaaagataggaaagacatgaggaaaggaagcaataatacgaagactacttaaaatgcaggttagcacagtggtctctttggccatccactgagagtgctacatcttcttttgtagtaaagtctttgtcactgagcttcatgggtctcatctgaattgtctcagcaacgatcaaaggaccagggaaccaagacgagccctgaaagaacccagtgacatggctgcaccatccaattctttctataaaggacaaaatagtcaatgtctgtggctttgggagccacatgggtcatatattcttatctgttggattctacagcatccactcttagctcagagtttacaaaactaggctccaatccatacattggatatgagaagtaagtttatgtcagttgctgtgtgttttgtaagtcaacctaagacttcccatatgctagagaggaccccttaccactgagctacatagagcctcatcctaaatttcaaacataaacatgcaattctgccaaaaacactggacatggaattcttatgcctcttcccatttctgtctataaaacataactaatctcaaaatgtatcttcaaaactcagcacaacaaagcaaatgaaaatagcgcctatgttctccattcttctgggtcattaggatattctttgatctcccaacacatttttaagtgaaatgaaagatgtcttctctacagaactgaagtttatctttccctaactagaattaatacctaggaaactgcatctcaaatcccaagtggttaattaccagcacatacccattgtgcacacaatagctgcacatacaaagtggttgaaaacagctctcacatgagtatggcacttctgtaggactcagacaccgtgtaacaacagtgacaacagacagccggggcactggacttcttgtgtgaatgcatgtagcagagtcaatgagtatgtgcacaaaagtcacaagttatcatagagtgtacaagagaaggcactaaaaccctttgggttccagttctttgatgagaaagtaaacgtaaatcctttatccagggtttccacactatgacacatattcaaagctcttatctcacagggaccaagagatagcttactctgagaccagttatgaatggctgttccaggaacggaacaccgattctggttccccaaacaccatgttctaacacatcaataacttcatgaagattttactgtaacaaaggcattttaaaaatatattgggctgggcgttggtggcgcacgcctttaatcccagcactcgggaggcagaggcaggaagatctctgtgagttcgagaccagcctggtctacaagagctagttccaggacagcttccaaagctacagagaaaccctgtctcgaaaaaccactatatatatatatatatatgtgtgtgtgtgtgtgtgtgtgtgtgtgtgtgtgtgtgtgtgtgtgtattactgggggttgtagcacacacctttaatcctagtatttttgagaaagaagcagatggatctctgtcagttccagcccagtctggtctacatagcaagatctaggccacagcagacagtgagaccctatctccagaaaaggaaagacaaaacaaaacaaattataacaacctacattagagagacaatcagagaggcaggtgacagccaagcagggaaatctgttacaggcctcaaatgacatgatgacatctgatgacatccttagcctttgggctggtgattctcacagcaatattaggtcaaacacagaagcagcaggaaccgcttattaaggacactacagtcaatcaatccatcagccttgtctaatttttaacacggttcatctgttgactggggacttcagtttgcatgctatttaaccgagtctgcaaacactcagtgctgtgggtgagaggcctgcccatacctggagcagcagcccaggtcactaccactagatgacagcagcacaagcatcacattcccatctgtaacagtcagagaaacatctctaaccaaaaacacgatggctgtaggttgagaaccgtgcacagagaatttctctgcctgtactagcaatggtaatttggctgccccttgaggacctcccggtcctgaagccttctcccgaggaggcatcttatttcaattctgacatatttaagggacaaggaagtaggtgggagatgttatcctttgttcccacaaacattttcaaataatttaatatccttcaaaagcataagctgctttgaaagctcatggcatagggtcacttgctgctgctctgtttcctttctaatgtccattaacctcttgccattccctcttcagccccaccattcaacaagctctaaccattcaacaagctccaaccattcaacaagctctaaccattcaacaagctccaaccattcaacaagctctaaccattcaacaagctccaaccattcaacaagctccaaccattcaacaagctttatacctttcaacaagcctatatccttcaacttccactttccagagaaagtgcaccctgtcgatgtagttcactggtagatggctaacctactatgtataagactttggacttgatcccataaccaataatctgcaacaatctattcccagtaactgttgtgggttttttggaggtgggagaacttccttcacataaaaaaattactagctggaattatagacagttactgccttcatctctttactcctggctcagcacattctaacttggcgtccatgtatactaaaaacaaaacaaaaacaaaaacagaagctggagagcaatgtagtgtgtgcgtgagtcagactttccattattatgtcaagaatctgtggaaaacaacttaaatgaaaataattatttcattattattggtattagttccttgatacagttcacagtccatgggtggtccagacctaggaaacttcaaaagatcatagcagaggaaccgtgtggtaaggcaactcacctgacactggacagaaagcagagaggaaaggttgagggacaaggcatccccacaggccatctccagctactaaggcttccatcatcactaaaatagcatggtcagctggcttcaacactcgaacaggtagcctacatttcacattcaaactacaatacaaccaatggcatcacttcttccatttgccccttagcttacttgactctcatcttcttgagagtcgctgctattttctcgactttgctggccactttccctcaaattaccttttctggattccctaccaacatgtttatatgtcctgacaaacgctcaggacttgactcttttacggtctctcataatccctgattatgtagccctgatgactgccacactaatcatagatgcataggtgacaatatgggacagaaagtaaggagagctacagcaaaccccgatgggtacattgtaggaggggagatttgagaagaagacgagaactcaaagaagcaccatgtcaccaatgccttactgagttccttgctctgctattcctgaacctaagtgtcatccatattatggacagggaacatttaagggccagttcagcaaccccaagagtctaagagtgatctatcacagagttagtaagattaaatgagataatgtatgtgaaacatttagagtaacctccacacaatagtgaaagcatttgtgacatgctgggaatagagcaaatctaaaatgtccaacaataaaacatattgggtttgggttttatcttaatggctgtgttaaattttattacatttatcccccccctctgtgtgtgtgtgtgtgtgtgtgtgtgtgtgtgtgtgtgtgtgcgtgtgcatgtgtacacatgtgtgtacactgccacagtgtgtggacagccagttctcacccaccaccacctgggtcgtagagatcaaacaatctggcttagcagcagacacctttacatactgagccatcacacttggccaatttgcatttccctgagacagttctctctgtgaagccttcactagcctggaagtcagtatgtagattaaactgggatcacgtggtggctatcatcttgaatcaaccttttaagtgctggagttacaggcaccatgcctggcaatttttagtttttttaaagatgcctttattcacatgattggcagttatatagccattaaggatccaatccacagatatcagagaattaatttttaaaaaagcatttatcttctctttacttgtatgaaattgtattctggggtgttaaaatataacttgtgaatacagaaaactatttacaagagaaaaacatcaacctaaaggtgcaaaagaagtgacagaattagaaaaatgtcattctggggtctctcacaggataatgctcacgcagtagatataaaagacacagagaagccactggggagaaaagtcaattgagaaatttgaaaaatagagaggaaaagctgccacttccatacccagaggctgtacatagcagtaacagaaatgagaaagctagccatggcagcctactgatgttggagattgtgattcaaactcatccagtcttcaacacacgctgaccctaatgcctgagaaacagaagataactgatttatgcatcaaatcatgtgttagattacacctttctatccattttacattacacggagttatgcaaagggattagttactccacatagtcaagtcatttacatccaaataattccattatagcctatagctagctgtccttcagtatccatggaggactcctgatccatccttgctatggatcaggatcgtagacatccaaggtcaagcatgctcaatgtaccatgtttacatatacacatccctttagatattcaaaattatctctatattaattgtaatatccaatacaacatgaatattatgtaaataggtgtgataacattatctagggaataaggaggagagtctacatgtgttcattatactctgtgttgtttttaatatctgcagttgtttgatctcaagggtattgaatgcagaaggataaagtgtagcttagaattctttttttttttcctgaggtgtattatgaagtatctgatgctaaaacaataattctgcaatttattttatattattctattaaaaggcagtaatagagttagggaagggaagatgaaactactataatactggtaatacagatgatgtaggaagctgagaaacagatttatagaatttcattagacttcgacctgtgtggggggagtatcaaatttgcatagtgaaatgtcttaaatctgctatttaaacaattcaatgccaacactcaaggatcatctcaagtttgcagccagcctggtctacacagtgaggtccaggcaagcctgggttatatgctgagactatctcagaagagatttcacatttcacacaagggcaagaggagtcacccagtggcaaagtgtgtgtcaagattcaggttgaagtccaagcaccacataaaatattgtctgatggtatttttaaaatgtgtctcaaatatttaaaaaaataaaattaaacaatgtagacacctgattttgcaagagaaagctcagtctgttataaagagtacattgtagttagatatccacccctcccatacctgtagcactgaccacgcccatttgggcatggtcactcacaggtgaggacatgcccaagggaggactagatctggggtccgggaccccagagctctctcttgcttctggttgcatcacagggaacagcctgggaggatccttggagctggaacctgcagcagtcacctgcctcttgtgcaagtgcattctccccaaataaacttcacttaacctctactgagtctagtgaatcttgattcccacgaaatagtaaagtccttgtggtggaacttggagcaactctcaggtggaatatatagaactctcttttctgtctacagaaaacaatctgaccggtccagggaagagggcagaggcatgaacttctgtggctcttccagaagctgaggactgaggattccacaaggacacacttacccactgaatggaattccttggagagcagggcatgatggtgaacatctatactcccagtactgagagggcttaagcaggaagactgtaaattcaacaccaaccttgggtatgtaatgagtctcggccagcctaaactacataatgaatgaaagtggagaacagtctcaccggaggccatctaaattcaacctcacttctcaactgtacaatctggctggctgagactaggaaccagtagtccatcagggtctgtttgtgtgttcgacacccaaccacaaggattcacatttcaaaggattcttggttccttaattttcccccttctcagaaaaaaacatgtcaatcataaatactcatcctgtacatttgaatgtgctcagcaattcacatctttattctaccccatctgaactgagctgtgctctgtatttgtttggcacagggtaccaaaaacaaaccaactgcccaaaccacatcggttgaatggacaatacacacagccctaaagtgggcaacagcctgtcaaggagggctggtagaatgtgtgacttctgtcactggcttgtcacctttgtcactggcaagggcaaagcccacagagctagccaaaggcctgtagaatgctaggctaccactctttctaactatgtgctacaaccctagtctagtttcctcatccccaaacttgaaatagctatctttattaatcctgtttgttcattaataccttggcactgattttgacacaataccaagtagacattatttagtattcttctcattattattattcttaaaatacatcctggggcccagtgcttaagagagtttctgctattctggagtaccagagttcagttcacactagttacagcctgttccgggcttcccaggtacacacacacacacacacacacacacacacacacacacacacacacacacacgcactattttttaaggactagggatagagaaatggctcagtgagtaagagcactcactgctctacagaaaacctgggttcagttcccagcatcccatggcagttctcaacccatttgtaacaccagtaccaggttatctaacaccctattttggcctcaaagagaattactatacatatggtgcacataccttcatgcagtaaaagcacacacacacacacaaacaaaacattttttcttcaaagatacaaattatatgccctatacttttaagtatggtcatggccaataagtatttcgtttaacttgaaggaaattataagtttattgtgaaatcatttaaaaagatgaaggaagcacagatcaaattatcttcaactacttttattttacttttatatctaataaactgtaatttaaaaggaaatatttaagaccttgcttatgggaaacatggtgacatttgcctttctttctagtgggcaaggaggctgaggcagtaggattgtgatttcaaagctggcctggaatcatagcaggttccaagcaagcctgcactagacgatgtcttaaaaaaacaaaacaaaactaaaactaaagctaaagctaaaactaaaactaaaactaaaagagcccatgagacctgcttgttagaacccataactttgagttattttttttatttaaaaagcttacattatctattttacaatatttattaaactcacgttcaaaacaattcatttgatgatagcctggggattcactatctattaatgttccccagtgaatcagacccccatcttccctcccctccctccctccctccctcctccctccctccctccctcccttcctccctccctccttccttttccacatacagattcacactgcaactatcacagctttatgcatacagaattcaagcagtagctgcaaatgttcctcttaaatcaataaacaaaactcaagttgctgaccaacacagcaacagctgctaaggtaaaagtaggaagaattatttatcttcccactgaacataggaaaccccatgtgtaaggaagaatcaaaatctcttatctcagcaccggagctctaccggacctgtgaccagtagcaatacaaaatgtatagaaacacacacacacacacacacacacacacacacacacacacacccttgagaaaggtatccctatatttctcagactgatcttgaacgcatgcgctccagcagtcagcagtcctccacctcccaagtgcttgttactatagccaggcaccaccacaacctcagaaaaatccttcttgtgggcagaactctgtagggtaaaagtcattcaacatctgtcagaatcttgcaaaacaggcagatcaagaattttttttttattttaatttttggcattgaggggtaaccctgggtgttaggcaagccaaacacagggcatgctaaacaaggtgcttagccactgagccacaggagagcggggattatggtcacaatttcaaagaaccagctaagcaatgagaaggttccagaatctgccagcatcataagactggacagtggcagtgccaaagctggatatcaactttgccaccctcattcttattccagggaccttctgcttcttagtcagccaacagctctggggaaatttggcaaaggttctgccgttaagatataaaagaaacagagcatgtggtctgcaccctacagttgctcacaacctagttcaaatgaccccagtccaaacaggagcagatttttaaagcagtctgtttaaaagtggttacgttattaaacacctttagtggaactgaggaggaagagaagttgaaaaccagatacagccaaatccttaggaacctactgtatgttaaagactatgaagccctcagagggcagtcaagaggaaagcatgttgcctgtgttacccagtaagaaaaccctgagctcacacaaaagccacaatcttgtagacaagatgctgtgcgtgggctcttaaccagagcacacagtgcagaaagtctctggatctttgctcatttgtgtcctcccccacagtgacagtagaagtttcttgtttatttgctttccgttggcctaggtgatgcagttaactcttgccgctttccctttctttccttgttaaactagtttacaccctaagcaatactcatagtcctcttttctcagcattctgagtgctaggattgctggcaggttagccttcacttacctgttttattttggttgctgttgttttgacagaacacatgacaagagagcatcagttctcaacctctgggtggcgacccctttgggggaggcatctcatatcagatatcctgcttatctgatatttacattgcaattcataacagtagggaaattccactgataaaggaggaatgaaataattttatggctggagtcaccacaacatgaggaactgtgttaaagggttgcagcattaggaaggttgagaaccactgcaatagaagaatcccctcttcacacaggcagaaaagatggcctaggctcataaagggatgagttgaggagtgagtgagatggcttcaggggtaagatgggagattggagaagcaatgtagaaacaactactagaaccgattgcttctcgaattaaattgaaaggaaagaagagtttatcagagcgtctgtctgatccataaagaggtcgtgaagcacagctcagtggctaagagcatttcctggtcttccaggggatttgaattcaaataacagcacacacactggataactcctaactgcctgtaactccagctctggggtatttaacacctttgtgttagccaaggctttttgtacactgtaaagatgtgttgttctgattggcttaataaaaaaaaaaaactaaatggccaataggtaggcaggattttggaggaagagagaatgctgggaagtagaaggcagagactagaggtcgccggccagacacagaggaagcaggatgggtagaagattaggtaacaaaccatgagctatgtggcagcatgtatagtaataaggatatgagagttaagtcagtaacaagcctaagctattggttgatgatttaaaattaataataagtctctgtgtgattatttgggagctggctagcgggacagaaacttccgcctacacctttgtctagcatctctggagacgtgcatgcctggatatatccacaacaacatccacataagcaaaattaataaaaatagatttttttatggaaagaagttctaccaatacatgtagctagaacagtgcacttcatttcagacaggatcttgttctgtggccaggaactcactcgtcatcccaaaatagccctaaactcggggcaatccttccgcctcagcctcccagaaaatataattacaagtatgatcaaccacatctggcagagtaatccattccttttaaaaatattttacttttatttactttgtgtatgcatatgtgtggaggcacacatgccaagaactatgtgtttaggtcagagaactatttgtgggagcccattctctatttctatcatgtagatctcagggacccaactcaggtcaggcttggcagtaagtgcctttacccgctgagccatctcacaggccctggataacagactgttcagtgattggtgggtcatttaaataagttagggaggaaactataaaattcttagcattaaatgaaaatgaaagcacaagaacattgggaatgcaacaaagcagttcaatggagataggttactgctatgagcagctaaatttaaaaacccattgttattaaaaggaaataaattaatatgaacctcaagatcttagaaaaacaagaaaaagaaaaaaacagatactagtaaacaaaaacaaagaaaaaagattgtcacataaattgatgaaactaaaataatacaaaaaatcaatgaatgcagagttgggtctttaaaaagacatgatccacagatcattaaccaaactaaaaaagagagaaaaacaaaattagtaaagaatctcacaaagacaaagccttaggtcaggtcgagtttaccagagtataaataaaagttaaaatcactggtcttgaatatagttcataaagtagaaggggaagtaatctaccaaaatcatcttatggaagcaggattgccctggtagtaaaccagataaagtttgccactatgtgtaacaatcaatcagtcaataacaagaaataaaactaaagaacaaattttcttaatgaacatgtgaacatggttaaaatttaataaaatattacaaaccaaattcaacaatatgtttcaaataccttataactactagcagattggcttcattccaggaatgcaagggcaattcaatgtaataagcaaaagtaataaaacacataaatggactatgggacagaaatcacatgatcatctcaaaaagtgcagaaaggacttctgataaatcatcccttcctgaaaagaaagctctgaaaaaataaaaactggaaggaatattcctctgcacctacagccaccattagactaaataggagggaaaatgaaagctgggtctctacgatgagacaccagtaagtatgcccaggttttcacctctttgctaatgtagtacttgaggtgctagccagagcaataaggaaagaaaagaactagtgtgatacaaattgcagatgacatgagcctatactgtaaagactccaacaaaaacactcttgggtctcttcaacacttcagcaatgaaacagactacaaattcaaaacagaaaactcagacacttctgaataacagattttctgaatcaggaggaatcaggaagtaaaatttcatgttagcttcgagaaataaaacacaacaataaaactacagcatcttgaagaacataatagaagttgcgaagactttctgtgctcatggattgccagaattaacatggtaaaaatgactatgtttactaagctggactcttgatgacacacttatacacacacatatataataaacacaattttaaaagatagaaatgcaatcacctgtccaaatttacatgggagaatacacagaagcttcctaaggacagatggtcaacactgaaaaagtagatacttcactgggcttagtactcagacattttgcaaagtcacatttatacaagccatatggtactggttaaaaacagaaaacacgtaaaagcaaagaatagaaacctcagaaacagatatatagattacaaagatacataaggatataaaagtaacagactatttagcaagcgattttggaaaacctggctttccacttggagaaaagaaacactgaatctacacaccacacctgacacactcaaggagactctggatcaaagaagtgaaagggcaggatgatataattagtagatgagaaatttcacaagcctggaggaagagagattttcttacatgagggagaaaataaacagcacaaaagcataagttaaacatagaaatgtaaaagaaggataaaaagagaagaaatattcaccaaccaatcctgcttctgtgtctcaagattaataattacaaaaactgaatcaaagtagaatcgtggaaatagcaatggtttgtcaataggatgcaacttggtggggggagactgaaataaaagcttctatgatcttgttagaaaagtgacaatgccacagtgtttgaccaggccataaaacaagtagcagactcccttgctatctaaattctgggctcacacatagatagccacagccacctgattctcaacaaagtgtttaaaatttggctggaaaaaggacagcctcttgaacaaatggcaatgggaaaatgggaaagcccatgtagatgaatggagccagatccccattttgtcctgtagaacaaccaatgcaaatagattcacatgatcagaccttagggtggggacaggagatggttcagtctggaaagtgcctaccatgagagcatgaagacctaactaagatgctaccctcagaaccctgctaaaaagcagagctgggctgcacacacttctaatcccagcacgggagaggcagagccaggaacatattagggcacgataatgagagaatttctatcagctattcatctgacaagagattgatattcaagacaaatgaagaaccaggaacaaacaaaaagaactaattatccaacctaaattcagcaaatgaactgagtagtcatatttcaagaaagaaaatactgggatcagagctaaggctcagaggtttagggcatttgctcttgcaggggacccagcttcagtatccagcacccacatggtggctcacaagcattcctaactctacttctaggtgattgaacgctatactctgaactttttggcatgcaaggaaaaagattatacatataaaaaataaatctttaagaaagtaaataaatgcaaatagcgaaagaacacattttcaaaaacggtcagagaaataccaatcaaaactacattaagattcagtctcccccactgagatcagcaattgataaatgggacctcctgaaactgagaagcttctgtaagactaaggacacagccagtaagacaaaacgacagcccacagactgggaaaagatattcaccaaccacacatctgacagagggctgatctccaaaatatacaaagaattcaagaggttagtctccaaaacaccaaacaatccaattaaaaagtggggtacagaactaaatagacaattctcaatagaggaatctaaaatggctgaaaggcacattagaaagtgttaacatctttagccatcagggaaatgcaaatcaaaacaactctgagatgtcatcttactactatcagaatggctaaaatcatcagcaaagtggcaggatacaagattaactcaaaaaaatctgtagccctactatgtatggatgacacattggtggagaaagaaatcagagaagcatcaccctttacaattgtcacaaacaacataaaataccttggagtaacactagccaaaaatgtgaaagacctgtactgtaagaattttgagtctctaaagaaagaaattaaagaagataccagaaaatggaaagatctcccatgctcttggataggcaggatcaacttagtaaaaatggcaatcttgccaaaagcaatctacagattcaatgcaatccccatcaaaatcccaacacaattcttcactgaccttgaaagaacaattctcaactttatatggagaaacaaaagacccaggatagccaaaacaatcctgtacaatagaggaacttctggaggcatcaccatccctgacttcaagctctattacagagttatagtcctgaaaacagcttggtattggcacaaaaatagacaggtagaccaatagaatcgaattgaaaaccctgatattaacccacacacctacgaacacctgatttttgacaaacaatccaaatatatatgctggaacaaagagaacatcttcaacaaatggtgctggcataactggatgcaaacatgtagaagactacagatagacccaagcctttcgccctgcacaaaacttaagtccaaatggatcaaagacctcaacataaacccaggcaaactgaacctattagaagataaagtgggaaatacccttgaattaatcagtacaggagaccgcttcctgaacataacacagacactgagatcaacaattaataaatgggacctcctgaaactgagaagcttctgtaaggcaaaggacacagtcagcaagacaaaacggcagcccacagactgggaaaagatattcaccaacccacatctgacagagggctgatctccaaaatatacaaagaactcaaacaatctgattaaaaagtggggtacagaactaaatagacaattctcaatagaggaatctaaaatggctgaaagacacttaagaaagtgttcaacatcattaaccatcagggaaatgcaaatcaaaacaactctgagataccatcttacacctgtcagaatggctaaaataaaaaacaccaatgacactttatgctggagaggttatggagaaaggggaacactccttcactgctggtgggagtgccaactcaggctccagctgtggcaaccacatggtttttaatattagtaaaattaagtaaattaagcctgtttatttttttattttttggcttttcaagacagggtttctctgtgtagctttggagcctattctggcactcgctctggggaccaggctggcctcaaactcacagagatccgcctgcctctgcctcccgagtgctgggattaaaggtgtgcgccaccaacgcccggctaagcctgttttttaagtgaaggttttgtctgactgaacaacagcagtgtatcatgacataagaaatatgatcaaccagattcttcccctgaaatggagtcaattacacctagaatgaacaaagagaacatgtgccatctttaaatgacgagagcatttgggacaggaaaatggagaacaccaagcaacaaggggaccagactaaaaaacattaacatatgttaaactgtataaaatgcttattacagatcacatccataatacacaacataacaatttatatatctttacattaaagtaaccctaaagcagttttcatatgtaggaaatataacctaacctaaaaggcaaacgaactgagacctagcaactgagtgtctaggtaattatagactgctattgtcaagaatgaccaaataaggtatctgcagaagaacaacccaacaggctatttctgtatgtcattgctatatctcctactgacaagttgtaacttgcttttttatggagtgctactccatgaatccttccctttttctgcttgaagcctgttaaatttaatctgactaagattcttcttttttgacaatatgatacagaatatattacatgcataggatatatatgcacacacacatacatatgtgattttagactttattcttgggataaaatgacatcaatgaaatggttttagcttgagactagccaatgtagaactgtattctgttttactgtttaaccagaggttcatgagctaaacacatgttctaatattgagctatacttttaggccccaaatgtgaattttcaatagtccggtcttcacaccttgtggacagagccagaccttgagtgggagaatgcagagaagttggtgatgatgactagaactcagaaaaacggagacagagtgatgtaaagtaggagaagttttaaagagatattactggcaagattaattggttgtagagtatgaaaggatcaaggaatgaaggaatgaggtcagaccagacagcggtgccttggtgaagagacctagaagagagtgttgggagatggagaggaacaaatgtggttttagctttgtaacttcctgagacccgtgataggtgaatgagaggtgtctggggcctagggggaaacagcaactaatgattcagatctgagagtctactcccctactgaggttaataaagcagcccagaggatatttacaaaaggaaattcataaacagtgtttcttgacaataaactaaaagctatgtatctaccctttgttatcacaaggcaaaggacagtgaaaatgatcatactcagatgaagcatattagagaaataatccaagccagaaactaaaggctcctaggataacttcttcacatttgtcccattggcagctgagccatatgtctctctctctaacttagaacagttcttgttgtaccttctatgccaccccacaaaatactgagtcctaacacaaccaaccaaagtctggatttctttctaaaaataggatagcaatatacccaattcaatatctaaaaataaactgccaggatgctttcacaaccatctaccaccctcacagccatttatccaaagtagcactgcacagacaggaaggtataattggctttcagaacatcttggtagctgtaaaatacaatacttcccacagagagctcacatcacttaccatctccaacagtgtgttgaagtctatgggaaaaagaagaattcctaatttatgatcagttgcaaaagactatcttccttgttgttccatttgttattcttttagagagaaaacttatatcttagcaattaagtgacttactatgtacaaaaccctgcactgtgtgtttagctgcacttacatgggatcctataagagtccattgtataatgggctttaactacactacactagcttaaaacccataaagatttttcttttcttttcttttcttttttttttttttgacctaggagtgtttattttctgtgcgttttatctacagaactttaatatcagagccgggcatggtgatgcatgccttgacaccagcactcagacagaggcaggtggatcaatctctgtgagtttgagaccaatatagtctacataatgagttccaagacagccaaagctacacagtgagatcctgtctggggagaagaattttaatgtcaataccaacttataaatagaacaccacagacccatgaaattgttgaataagcactttcacagtaggagaaaatgaaacagacaccaatttatcaagtatactgaagtaaagacttaatgctagttctcttactgggcagttcagagaacaggaaaagatgggaagcttgtaatccactcattaggagatgagtggcagtgctggtcatggatctaagtggttttgttcagtgagcctgggcccacattagaaagacacatgggtttaagttacacaacatggctttcccttttgcgttttcacaaagtaagatcactcaccatatacaactattaaactcaatacgcaaaaacacagagtcctacattcatgctggataatggcaactctcccttggcataaatcttaaggttctggagaggtgactcagcagttaagttcacttgctgttctttacttcccagtacccatttggagaagtttacactgcctataactccagctccaggggatctgatgcccctttctggcctcttggaacacctgtccatagacacacatatacacataaatataaaaacaaaaatcagtcaacactctttaaatgaaaacatcaccactctcaccaccaccaccacagatgctcccaaagtattatcatcccatattaatgcatcctctggcataaggctactcttcagctctgaccctggaaaaacaaaactgtatctgcaccgtgcatgacttcaaaggcatctgctgggcccattctacaaaatcataggattaacaccctggactaagctgcctcccatcaatcaatggcctctgctacttttttatttccctgtgttctgggggaccagggtgtcccaggggtcaaacccaagatctcatataaagtaggtaagcactctacccttcagctacatccttagtccagcctttgcttttgttaacaaagaaaccagaatattaggaaaggatgagatactcaaaaggaagaaggaagaaatggaggaggcagggagggagtgagaaagggagggaaggagagagggaggcagaaaaaaaaacagagggaagaagtaaaaatacaaagggaaacacatgagaagacttttgccatagtcctccagtggattgctgagaaatgtgtatctccttcctgggtacctaaagaaataatttaaatgatacagagaacccttctccctgatgtataaaaagagacccaactggatagtatgaacattttcagtatagcattaccacgcaataaaggctagatttcctcaaagctgtgaatctcattcttcctgaatatactctgtctacatttagcccataatcagtaatgaagtttccagagattccatagtatgttgggacctgatgggactactgaggactggaagatgttttcctgctcaggcaacactttcaagcttgtctttggaaaggacaaaattatcaattttccctctcacccacagtagaacaggtcaaaggggtaaaaactgtctatcacgattggtaccctcatgtggcatccagtgaacattatttatcttataattttaatggtataactactttgaattattctaatggagtagaaactgtattttccactgtttatatttaaatattttgtgagaactgtagtgacatctcagcagtgaagaatacttgctgctcttgtacagaactaaagtttatgtccaagaacctacactggtcagctcacaactgcctataactccaactccaggggctccaacaagctcttctgacctccaagggcatctgcctacacattcacttatacacatgcagacagacacatacacataaataaaaattcaatcaaagtaaaaagcactataaagttttacatttggcaaaattacatcaactaggaagtcacagacaaaactttatttctccttaatgatctttaatactgaattccatgactatttctaatagaatggagggaaacacaattttacctattccctttaccttgtggcatgggtgcttacatggatgtgagtgtgagcgtgtgtgtgtgtgtgtgtgtgtgtgtgtgtgtgtgtgtgtgtgtgtgtgtagtgtacagaggtcagaactggtgtcactccataagcatcaactaccttatgttttcgaactagggactttcctggtgtaatgctccccaattaggctagattgcttgagctaaggatctccacgatgctaccttttcagaagtagaatttcaaatgtgtcgccatgtctggctttcgtatgtgggttctgtgtgtaaaattcagcgtctggtactagcatgccaggctctttaccatctgaactatttccctagccccaaaaccttttcagtcatttgtcactaggcagtggttctcaacctgtgggtcatgacccctttgggggtcaaactaccctttcacagtggttgcatatcagatatcctgcatatcagatattttcattatgattcataacagtagcaaaactacagttatgaagtagcaagaaaaataactttatggttggggtcaccacaacatgaggaaaaggtcacagcattaagaaggccgagaaccactgttcattaaggatatatttaatgatgaagctatagctcactggtagaactcaggtagagtgcctgcttagcatacaggaggccctagctttgcctctcagcactctacccgaaaatatatgtatgttaagagcatattatagagctagcaagatggctcatgaggtaaaaatgcttgctgccaagcctaaagccctgagtttgatccaagagaagcacgtgggggaaagagagaactgatgcaggaagttgtcctcaactctacatgtgtgacgtagagtgtttgtacacacacacacacacacacacacacacacacacactattaaaattactatattaaagtgtgtgtgtgtatatacacatgagtatgtatggacacctaaatttctgtactgtggttaccatttcaaacttaacctgtgtgatcaagcacagatgctgtgtgctctcaacagttctgccaattatggtgctacctttatttcagtgactataactaatttcaattgaccaaaaggctggtgattctccagtttagattcaacaggaagtctgaatttccagcatccttgtatcatccatcccccagaaaacactgtggacaagtatttaccaagaactcacatactcagtgttcatgaggtgggcacccagcaaaacacgcaatagagatgagaaggcagacagaaaggaaaagtaggtgatgggtagatggcacctggcaggcaaggcaagaaagaagaccaaaagaaatcctaaatccaaagagcaatttgatgcagagagcatgcacagcctgggctaactgacaggacacagaggacgtggctttcactaggccacttacagatgcttctgggggatgcaggggtgggggacatgactgtgcttctaggtacatgagactgaaggacagagtctgagatctagaaaaggaaactcatgttcatggaacagcaactatattaatgtctcagtctctatcttatgagagaatcatgggaggggaagacagaaaacccatatggctgatggagattgaacagaacagaaacactgaacagagtgtcagatgctttggtgtttttcatagagaatgtttcacacagagcccatgttatcctggaactgattatatggcccaggctggctttgaacttgtaacaaatttcctgcttcagctccttgattacatgcctaagccaccatgcggggctcccacaccccctttagtaaacagcatccccccatcctcataaccaaaccctcaaaccatccttatctgggtccccagaaagctgaaatgacaaaatgcttataatcatagaaagaaaaaaatagaaaacatgatgcacaaataaagcattttaaagaaatattttcattacataaatgaacaaattatgcccttccaaatttttattataatttcagagctggttggttctattttcagacaattggctctgtccactttgaacaatgaaacttattttttaaaaaaagtcagttgaggaaatcagtcaacaccaattaaacacctggtctttgccaggcactgtggcaggggctgtgttataatatgccattgaattttaatagtcaatgtcaggattcattgaatcttggtgtgaaactgcctccacattcatatataggaggagcaaacaataaataaataataaataataaataataaataataaataataaagctaggaagcaaacaaacaaggaaactgttcataaaaaccaacatccaacactgtttcagcaacttttcaagagaatctgaagggaacgcagtcaaggcacctatttcaaaagtgcatggctaagagccaagtgcttaaataagctaaaaaagccaatcgttgggttataaggcagccattcagtgcatcacctaagccattggggcatttcactctgatccaagtcacacttctaaagaacctttcagacaaaactaaaatgacttaagagcaatgctctttgtcactgattctcttgtcaaattctttttaatgtctggagcccaataacaatatccaccatcctgtttcctttcttagataaatgacatcattatctttcttcattggggggagttttgggttttgcattgacaggctggcattggactcagagagatctaccctctttactttctaagtgctgagattaaaggagtgtgctgccatgtccagcccaacaacatagtaattttcaaaacatcttcatttatttcagaaactaactggacatgtactccgccaggggctactgctatcagactgttatgtctgcaaaatttttaatgtggtggtttaaacagctgtatattgatgccaagggtagagccaggtgtggaggcacatgcctatatttgcaacacttaagaaacaggaggaccagaagttcaaggctaggtccatgagatactgccacaaaaaagaattattttcttaagatctctgtgagaaaatccacactcataaagtggtcccttcttcctactgaaactacatgcaaggtaaacccttataaaagtcacaatgggagtcacagagttgaagccctttgtcaattagtcctttagaagctcaggggactgcttggctttgatctctacacactaacaactgatttgtattttattaagtgcataccctagatggggattactagctcagttctttcagtcagtttctttgacttgtctgagccttggttgttcatgggaaatgtgcctaggaatggctgtacttcaaactatggtaaagattacacatacttacatgataatcccagagcctgatagtcagaggaagcacagtaaatacagataatatcataattgtagacttttaccagataaaaccaaattaattagaaaaaatcaaattataaagtattgggagactggggaagcaaataatgctaagagtaaaaggagcgatatctaagaagtcaagaaactacacagattcaagatctcaatcaacagcagaccctggcctctggtccacacatttaaacctctcctgagggcatcaccagtgttttcacaacccaatgatgtgcctgaagatgacaggaagccttttaaaaaacagatggaactttcattccatgcgtttaaaacggagacagattaagtgcataattgactggaaatatttctatcaaaagtgatttagcatcacaaattcaatatattagatgtccaaactttaattaactgcaccctattactagtctaggaaactaattcagttataaagcaattgcttggcgtacaagaggccctgagtttgacaccaagaccacttttcaaaaagaaacctctcaaattctttctattaaaaactgaaaaaagacacgtttcaaataaattaattatgaaattttgaaatggaatgccatcaatttctatacaactaaaatgagaccacctcagtgataagggttttcatgtctgccagagacacaaaagtgggcatgggaatctttttttcctcttgaatgattttccctatatttgcaatgcagtataaaaagaaatgcctgctcccctctccagagctataaagataaggaatgttggaggaagcaaatagatacaaggctctcatgactcaaaggcagctgggattaattgatctaaagaactccacactaggaccaaatacctagttctttaaagacaacacccctcaggaagtgttccctgagtgctccctcagtcccgggtgatttcctgggtgctgctaaatctgcataggatgtaaagccacagaatgtggtaggtaacaagggaagagtcaatctggagaccctctgaccccacagcactgtccatgacagctggctcaagaagaaccctgttttctctcacagtttccccctcatttatcccaaggaaggtcagatatgtagccatagcagaaaccagaaatagctcatcagtgaaggcattagatgtagtaatgacttttcaaacattctttctctataagtcatcatctagtgccaaacacacaaagaaagaaagggtgactctggacagtgttcgcttctagatttgccttggaaggaatcacacagtatgaccttgagagagttatttaatctccacttccccaacaaccacaggttaagtcaaatctactctttgttttctttttctgaacaacagtggatgaaatattctgaagaagctgctacacaaaaacctacttgctggccagtgacagctattcatttccaaccatctaacacaagccaggtgactgtcacagaagagtgactggctataaattttactgtgcaaaataacaaatctgcccgaagagaccagcaaaactcacatgctaccaaatagcaccttccagagttccacattttaaatttgaaattaccggcaaaattaagtgatgcccgagactcaagaacactttttataaaagggaaataaaacttcagtgtatttaaggtcttatgatttctcaggaatctgtccaattctcctttaacaagttctattagcccaatttctgctttatatttgataaatcactagtgtggttgctggatagatgatagctataaggtagctagatagatgataaatcgatgattgatagctagattagatagatatagatgatagatagatagatagataattagatagatagatagattcttgcacacagtaacttttcagtgatggtactaaagccccagccattgctcaggctaaataattgctttcccacagagctgaagcccatgctctcctcttagtacgtcccttccacttaggaaaatttggaaagccagtgccacaattcagtagtccatgcatatcgctgtagctcactgttaaagggtttgtctaacaagtagaaggctctaggttctagtctcggcacacacacactccacagttacagacttgctttcatctccagccttcacatttcctgaggctggaccaggggagggtgcagccagaaccccagtgcccgaagctggggacacagctcagtagttcagtacttgcctagcaagcaaaaaaggccctagtttcaagcctcagcatcataaataaacaagattactaatggtctattatttattcattttctaagagcatatagcaaacttgcttgcattagcaaacaggacaaccacttaacttcgagaagtacctgtatggcacccaggtcattacatgatagaaactaaatttagaggtgggcagacataacctatagaatgtactcgaataaatgccgtgtgcctgcaatacaatccttgagaaggtctaggcacggttctattcttttataactgtgaaaatgtggaagggggaagaatgacaaaaatgacacgaaggacagaggtaacaagacacaaaaggggttaaaacacccagaggaaatggagaggggcagagaccataacagtcctcccttgagatgacatagagcagacaactaaatttttcttttcactactctgaaagagaacagagaaccaagcacacccaagacatgccttgtggcaaaaggatctccaaatagcaggccgggcctttcagaacgtggagggggcggggtggcagaggaaggcactgattggcaggcgacctgccacccggagatacgtggcaagcgtgctcacctgtgaacacgttctgaaagccatcagctgtcgctgaagccccaggtgccttggaggccagcacaggggacccgccaccactgtcatccgcagtagacccgcgccccagcaggtgcacagatcctccggcaccaggcgtatgaacgcctagctcctcggtccagtcggctgagcggctaaggccgccggcaaggctgccttccaaccggtgcttctttgccggggccgcagcagaggccaaagcagttctggggctccggctaacggaaggctccggtcgcttcttgatcctaggactctggttgggggactgagatggggagtgattgggcgagctgagctgccgagtggtggtcttgatgtagcagggggtgatgagtgggtaaggtttgaaacagcgggggctgggcgcaggactgccaggcaaagacgcgactgcagtgacactgggccttcgcatcccttcctccggctcttcctccagcctctgtggagcttcttccacttctgggacccattcctcctctggagagcctcggggggcatcctcaaaggcatcctctccgcactcctcatctgtgtccccagcttcgggcactggggttccggctgcgacctcccctggcccagcctcaggaaatgtgaaggctggagatgagagcgagtctgtgactgcagagtgggcggtcgcgtagccgggagtctcagaggccaagtgggctccggaggacggaggatgctcaggcaccggggacttggtggtctcaggcaagtcaggtctcaccggttgtgcctgttcagtgtcctttgcagcctcgctacttggtcccagcaagaactggtccaggcccagaaaggccccgggctgaggggagatggcagtggggggcgctgcaggctcctcggagtcctggagaagcagcttctgctgctgctgctgctgctgctgctgttgttgctgcaggcgaattgcctgctggatgtctgagagcaaatcctcctgctcagtagccgagtggaagctatagatgtccgtgtccgaaccagaactggtcctttgtccatcttgcgctcctgccgcagttcccaaatcctccgcagtcgcctggacccctaccccagcctcggcaggcctaggaccacctggatggatcacctcgaaagggtcggcacactcggtatccgataggccggtctcctcagcagagagactgaggtccggggtcttggtgactatggagtgagcgctgtccagctccccaatcggcagggcctgagagtccagcacatcctcgcgcgagtcgccggcacctttccccttggtcaggttctttctgatccgcaggttggaaaacaccgaggctctagaatccgacttgctcttcttcttgctggtctccccgctgccccctccccccttgccgtgcttaccgagcgcctttttgctcccgctcgccttctttgtggtttccgcatccctgggccccgcggcatcctccgctccgccgccgccgccttcgtgggaggcatcacctgcgcttctcttcagtttcccatcctggttccccatgtttcaaccccgctgctgcgccgccgcgcctgggggtactcaggccatctcggccctggccagggccaggggagtgtccgggacaattcaggcagctgggccggccgttgggagtggaggccgaggagcgcccagctggccccgctcacatctgctgccgctttgcataatgcgcggtggctctcccggctgccgtccctgcggctgtggttgcggccctggctggcgggcgcgaacatgctcagttcagctcgcactccccaccaatggcagcacaggactcagccttggcctggctccccgcccacctccaccgccccctcagtgccccctttggctcctcccgcaaccaagcagaaaaacgttctcatctctaagacttgataattagggggtgggggctcgggaaagctgtctctgtgtaaccgactagcgttgaacataggctattcctgtcaggttatctctgggatcttaatccccgctttgaaaataaaacatattgccctcaaagtggtatgttggaacatttacacgaaacttcaaagctcccagaccagaaatgagaaaaaagaaaaaaaaaagaaaatctaaagctgaattccaggtcaaaagtgccataatatcaggaacacacacacacttccgcctgcttctgcatggctccgattcaaataaaatacttgctgaatggatggactgttctgtttcttcaacagtttttgcacactctaaggtttgtgagtgtgccacttaggaaaggttccttccccaggctctgtgcctgttgcatgcacatctccaagaataggacattagctgccattcccaaagtgggtttgtgggacctttatggacagagaaaagagaggtaggggaacgtgaaaatacgcagattaaagctgattaaaatgctaatctccaaaattctatgtgtttaccatataaattagacaacatttgtatttaaaaagggtgcatatattataactcccaggaggtcaaactcatcaatattaaacatgtcacaatgtgatctcatataagaaggaaaagaaaaagaaatgcccttgctacaaacacaggaaattagacattatgttataaaggacagctgctttctcaagcaaatccatccaggcacactttgtgcagggccagggcttccctaagtttcagacctagattaacacaaacactttttcttgtttgtgaattgttgtcgttattttaatgacattaaattatagtttttgttaaatattttagagcatcattggtacgctagagagcttcaagcagtaaaaacattttttttaaaagataaaagtagcattaatgaaaaatgttattctttgttgggaaatctagccaatgattcctagcctttctcaaactacgatctttgaaacaagcattcattgaggcaggtggattgttgaacttaagtggccttttttgagtaaacagtttgaaaaactcagctttaactgtgccagggtaatatcccagtctccaaggaatcctgagagcctggaaagcctttatttcacctctttcacaaggctacagccaccccacccccgccaaagccacaaggcacaatttgcctatgggccactagaattctctgcctctttgaatgccacaatactttgaatcttgatttttgctctctattggggcatctttgattcagacctatttgtctctttgctattttcttatgtggtgtacccaagaagtttggaagaaaaaagggagggggcaaacagagctgaaggaaaagagactgtgagaatactgattttttttttttttaacattctttgaatgtgggagaataggtagcagttgtggggcatggccgaggttgaaagagctctattgtaaggtcacaaaaggagaaggagaaacgttagggacagtggaatgggagtgggagacggaggaggaaaggataataaagggatcactctgccagcagcagcagcagctgagggagcaccatcagtgcctcctgcagcccgaggagtttccccactcagggagctccaggaaaagctagcccttgaagacagatacagaaaacaaaataacaatggggacaaggcagaatgaagcagcagatagccaatttgttaagtattacatttattaagagataggaaatgtttgagagttaagcgtcgtcactgaggaggaaggagagagggagatggccaggaagacagtgtggggtatgaagcctgagagagaaaagattctataggtatcttagcaataaatattatataactcttaaaaactgaaaaaaaatcatatttcgttttcaaatgtagcacaaacacacaataaataaatgtagaaagattttttttaaagaattctggtttttgtttttgtttaagacaagtttgtttgtgtagtcctggctgtcctggaatctgctctgtaaacaagctggccttgaactcagagatccacctgcctctgtctcctgagtgctgggattaaagactttaggggaaaaaagacttaaaggggaaaaaaaaaggcttgaaggcatgtgacatcactacctgcctaagaattctgtttttcagcagggcgttggtggtgcatgcctttaatcccagcactcgggaggcagaggcaggcggatctatgtgagttcgagaccagcctggtctacaagagctagttccaggacagcttccaaagccacagagaaaccctgtctcgaaaaaccaaaaaaaaaaaaaattctgtttttctaaatgaagtttgtttttcttgttgttgttttgttttgtttttgaaacgggggtttctctctatagccttggagcctgttctagaactcgctctatagaccagactggcttcaaactcacagagattcgcccaaaggtgtgtgccttgaagataatttcatgaggtatattgtttaggtttaagggtgggggagcagccctaatagtgttaaacacaaaggtcatagcctttttctttcacagctataattatgggatgttttaggactctcacaaaacaacaacattagcattaaaagacaagctctatcttcctttgtaacccatagtttcacctttgcaaattataatcctaaccaaggcaccttaggaattactctaaaatctcttttatcaaaaataaagaggaaaagtgaaaagcaaataaaagtggttttgaacattcatgtgagaggtaatttgagagccaccaatatgtctataaggctgcagctggacactcaaggccaccccctcttgaggagcccaagcccacactccagtgtctcatgccccctcgaatctccagagggtctccttttctactaaccttcatgcttgaatctatgctgacacctctgtgtaacaaaccccagctctgctctaaatgacttggcctgaaatgcttttcgtggccaagtcaagaatcctggtttcacctgagccgaggtctgtgaggagaactcagttctttggaagtagcaccgaactgtctctgcctccacatcactgccattgacagaaatcaacttctgtgtctgtctctgctcaacattagagctgtgtttaaggagagcacagcgtctcctccctgtctaccaggacatatcatcatcaacccaaatgcacatttcacccaatagtttatcctagattcttcataccagccctggcttctcctaatgcactttcagaacccttaatcttggattttaaaatggtgtgtgtgtgtgtgtgtgtgtgtgtgtgtgtgtgtgtgtgttatatggtatatatgtgataggtgtgtatgtagtatgtacatatgtggtatgtgtgtttgtaaatggtgtatgtgtatgtagtgtgtgtgtatatatgttatgtgtgtgtagtggtatgtgtacacacacacacacacacacacacacacacacacacacatgaccactggcaattgagcacaagacctcatgcatgctaaacatggagtcctacatatgaactgcatatatctccagccctttatttctgtcctaccatgtctcagtcccctaaaaacattatagtgtatgtttaccaccgtacctttaggattcttactgttattggcacatcgtttatgtaggcagcaaatatctgtcaaacattcattttccttgtagtatgttaaagtcacaagaaagataacattctgatgcctctaacaatcccacataaaaatgtggcaatgggaaaatgtgaagaaaaagctggctttgaaaactacaaggggagtttagagagagggtacagagtatttcaggaaatgaatgctgccgaccaaatgaagctttgaagctccaaatttcctcttcaacatatttatagctcagaacaaagggcatttccacccctgggcaaggcagagattggttaatttagcagtagtctctttcaaaatcgggagtgatcactcccaataaagtttggcaggttgccccaaaatcttcatttatatcaagtccaaagcttgtgttctctattgattggcatagtgttcaaagcttgtgttttctattgattaccattatttttcatttagttcatctgtaaccacaattaatgtagaaaatatgtaatttcagtatttgtaaagcttcctcagaaagctagtttgggaatatccccacctgaacaatacagaatagtgtttgatttcaaagatatttaagcatacacactttacattcatgttttagatacctataaagtgacttataagaatcagatgctcagccgggcgttggtggcacatgcctttaatcccagcactcaggaggcagaggcaggaagatctctgtgagttccagaccagcctggtctacaagagctagttccaggacagcctccaaagccacagagaaagcctatctcgagaaaaaaaaatcagatgctcttatgtctagaataaagacagttttctggaatatcaatctgtcacgcctattggggggggatgattgtttaaggtcttgggtgtacgcatgcttcagcaaacatgcaaagttcattctgtttcactggggcatattaccatcattttggtattgccactggtgttcacacatttgattcatttaaataaaaataaatatatcccagggctggcaacagggctcgatagataaaggtgcctgctaccaaggctaaagacctgagtttgaaacccaggtcccacatggtgggaaggagaaaattaattcatgcattttggttgtatacagagagagagagagagagagagagagagagagagagagagagagagagagagagagagagagagagagagagagggagagagagagagagagagagaagggggcgatgaaaggaaagacagagggggagaaggggagagggggagagataagaatgtaataagaatttaaatgtacatgttaattcaacatctgttgctgcaaatagtttgataagtagaaagaaattattccgaaaaaatattaaggctgtaagtaaaacctttcaaggagcaaaagtaaatatctatacaagagctgactagctgatggtgtaacttgtagacacaaagccaacctccttatggactagaaagaccttctgggaataggattttgaggcagtgaagtagggaagtttatgaatgtccgtgggaagcagtcctgagcataaaggtcaacagtaaacaagggctgtagcttgggagtgggtgagagagacaaagggtgtagtcagaagacaggcttggatggagtagagagtgagccacacgtaggaggatgcagggtcagaaatgtatgcagatgccaactgaatccaacttacatggggatccatagaaaaaagatgaaaataggaatgtatcaaaataagggggaactccttggagcagataatttgtggtaagagcaggaggcagatgtgagctggtggacgagctgggaaatatgtcagaatatgaactgtgcacctggactgaagcaattcgaactataatctgttttcccatgaacacacatttagatgtcaaaactacagcatgaagttggtgctgtagctcagtggtagggtctgtgcttagcacacatgatacacacttgattccatcattgttatagaagacgattccatcaggcaaacagtatcactcccaccaacacatctgttcatatgaaatgaatgtttcaatgtttatgtcacatcattgctgcagataatctgattatacatgcgagaaaatgcccagaagaaaagagtgggatttcagctaaccattgtttgggaaaaaacaactgttatacatgaactggaacagctaatggtgaggcatacagacacgaaggagggacatcaaagactcacagacttatacagactctcagggtgtctctctaatgggagtagtatgcatactacagccccccaccccagaaaagtgcacatagtagtcagttggtgtcttcctactgaaggagggcaatggccaccatctgctctttaataatttctcatgatttgttttgtcttgtagtcactttggattccaggagtaacaggaccttaatgatgagggactgaaacaggtaagcagagtgagtattcctggacagatcattgcccaatgatggtgtttgtttgtgtactgtatagaagtattgtactgagtactgtatagcagcaatcatatttgggaaaccagactactccattacagtggtaatagcaataataacatatttggaccactccacaggacaagagctgagataatcatcaaccagtctatacgttgaccaggaatgcttagttatccatgtttcttgccccatttctttctccattgaaatttctgtcaagggcttgtgaggtggcgctgtgggtaaaggcacttgccacccagcttggtgagttcaatcttccacagggtggaaggaaagaaccaaaactcctacaagttgttctctgacctctacacttgtgccatggatttcaacagtgatatacatgagcattagctaaatatgtacaaatacaatacacttctgtcagtactctgaagctcatgtgagggtactacaaatggatatggggtcaccatgccccattaactataccttcccagtgggcatgttaaatcaatctccttctgggccttccactttacttgtctcttttattctctttttattattattattaatttttatcttatgtgcattggtgttggggtccccgggaactggagttagttacagacagctgtgagctgtcatgtgggtgctgggaattgaaccagggtcctctggaacagcagacagtgcccttaactgctgagccatttcttcagccacaagtatgtctctttaatctgtgtacttcttaagtggctgactctagttctttgggcctcctagtactggcttttgttctaaaactctaggggtggggggaaagcttagctttgataagtaaacctaggggaagttgagccactcacaatgtgtccccaaaatgagagaaatgaaggaattgccccacgaacctatgggaattaccgatattccaaggacattttcctacccttgcatggtggctaatactagctgatttctgctctatataatgagagaaagaagccagtattttaattaccagcctttagagccctgttctcaactggtaggtcatgacacctttggggggtagcatatcagatatcctgcatgtcagatatttacactacaattcgtaacagtaacaaaattacagttatgaagtagcagtgaaataattttatggttgggggtcaccaaaacatgaggaactgtattaaagggtcacagcattaggaaggttgagaacgagtgcttttggagtatggccacctggtaagtgctttctccatcagtcatgtcaaatcttgcttttgtcccttgtctatgaactctgaggtgatcccagttaatgccacttgtcactggaaataatttttgaagtttcattgttggcttttttgttgtttgtttttggttctttgttgtctgagttctttgaggtcagtgtggacttaggtgattatgtttttgacaaggatatttgaatttttactagaactaaggtccatttctttttttagttttgatttatttaattttattttcatttgtgtgtgcatgaatgcacaccatgtgtatgtcagagtctgtagaagtcagaagagggcatcggccctgtaactggagttattgatggttgtgagctaccatgtgggtgccagaggacccattgaacctgggtcctctgcaggaaccgtaagtcctcttaaccacttaaccaccgagctacctatctctccagcccttcttgtttcttttgtagttcagttatctcaggaagtgttggtttaggtaatttgtgcttagacagagaactataaatttctatgggccaagtataaaaagagctgagatatacattaagaagccaggatgtctagtaggtcactattgcaatttgtgtagctgtgaaaattgttaactgtactatcaggaggcccttagggaaaattccaggtgactagtttaattatagctatgagcctacgactaaggaaaagatggtgtattataatactactatgcagcctaaatatacactagatgaaaagaagaggtgacctctggataggtcattggatttctatataattttatagctagaattatttcttcaaaactgagaaatgtgtttttgctttatgggttgtacacaataaagtttgctctaaggggccaaatttacataacaaagttcccagacatcaatgctaaaatccctgctgaatgacaacagggatattgaaactgagtagactattgccaatgattttgaatcctacagttccttttctcccagtaggtcctccatccccttttgatgtaccgcattttgaggttttcttagccaaaggagatgctgcagtatcaagagagatgatttctttgatgtgttggtgagactgaagcagtcttttcatttaaaatctatcaagagagccaacataggcggctcactgtagagaaacagggcaattgtcattgaagtggaatgtgacaggaaagcctgaagtgacaggatactgatccctcacattatcaactcttgtgggctccatgggtctataccaaaccaacaagataagattttctcatgtttctggcaaagattttctcatgtttccagtgccttcccatccttgtatcaagagactttgggagatggaggagagagaacctgagccagatttgcagctatacttcttgttggtgccaaggacattgcacaatccagctacttcaactgctgctgaactccaaaatgtttgcctcctcttacttttgaaaacatccaatgagctagtagtgggctgaggtagagctggagaaaaaagagtacgtctcatatttgtgttcttgttctacacaagtaactttggatgtattgtaattgttttctcacccaaggggcttatgggcaggaaactttccccagccaatcaccacagcctgtaaaatttctaacaactggaaaggttagaaggttgagatgagcaagctaccatcttcattcatggtcaacacctggacctggaactcttgagaatttcataaggccctcagggaaagatcattgtgcatattatgatcgaatggtcattagaaaagtcattgccaccatgcacgaatagacataagcttgatagtcagagtatcagatagcaggattagatgatgactttactagggactaaaggtgctccaaccattatttcttcatagaagacctgggggcaactaataataggatacaagccaaaaaactcttagtcaacacaagcccccaaagactaattgaattgtgcttatctctttgagaagcagaaaatccctgagcagccttttctacagcccctggagtgcagtctagtagataggcatataatttgaatctttccaaagaacacacaaccagaatgttcattttcacttttagatgtagacttcttatataaatctaatgctcacatatcccttccagagaggtagcaaatgcaagcaaaagtgatgtaatttcaaggccccttatctctgtagcaatatggattaggtgggcttctttagagcactagagctgatagaatatgtatggttttattcttaatgggattttcatccagctggttagtctctcaatacaccggctaagaagagggatgcttgtgcagtccagtgatgaaaacctggagaatgcagctattgactacttgttggaaactcagggaagctaaactctgatgtcagtagaagatcacagtcacagaagtagatgtcttcagttagaagcaaacacagatctatccaggctgctttttccttggcttcctcattcatctgggtcactcactgaaagaaactgcccacactgaagttatctttctccctcccaagcccactggacagtcctctttggaatgttacaggtgtgtttcatcaatcatagttgtctctctgcccctttcatgtttttgtgtttgtgacgtgcatgtgtataagcctgttagcatgagtgtgagggctcgtgtgcacatgccagattgtcaggagttttccttggatgcttttccacttgattgtttgaggccaggcctctcaatcaaatgcagagctcaccaatatggccagtctcactagtcagcttgccctggggattcattcccatgtcaactcctgagactagaatttcaggcaagctgctatgctccctgggaattcatgtgggttccaggattccaaactctggtcctcttgcctgggtggcagccactttaattgtgagcaatcttctcagcccagtcccagatgtatcttaatccagtcaagctgacatccaagaacaactaacacaacacaggataagctaataccctctgaaatagaccagattgtcgaaccagcattatagcctgctggaactctgggagaagctgaaagtccataccaatgaaagttctcttagaagatgaaccaatccatacttaattcagtactcttccaagtgggaagtactcaactaaatctaacccatgattccaatatttttgaagcacaattttatccagcctttgcagtgccccatccttagactgttcagaatgcttcaccagcagagtgtaaatggttcactgtcctcattctgaaattgcattcttttgcagttccctagacagtgagtcatggttattttttgccttcaaatgaaaagactccaagtcaaaatccatcttaatacagtttggaagaattgcactgattcatatgcttatatatgaacttaggggagacattgggtaaagatttgagaaggctgcaattaagtcaggggatccttttacaatatataaatggctgataattaggccagtttgcgagtttttactagaaaacaccattcagactctgtcattctactggatgtgggtctacggtgtcttctataaatacagagctgcaaggaacaagttgtttgagattccagttacagcaaagtcaataaaactcaatgagtgactagaaataagcttattgctgacactgaggtctccagaatcttcagttgtgaggctttctgggaatggcaggctcctgcaggatgtagctacttaatgtgaggaaaataaaaatggcttctatgggactttacacaagacactatttttttttctgaaacaaattaacataaagcctgttagtgtgttggttacacataatagtgggtttcttcttgacattttcttatgtagtatattttgatgatattcacccctcattactctctgatctagctcagggtaatcgccttccattttttcaaagattttgaggcttcaattttcttaatagaacattgaattgctttacttcatattattattattattattattattattattattattattattatatttgagataaggcctcactactttgcagcctgggcttgactagaactcagtatgtaacacaggatggctagatatgtgcccttgacctcttgatcctctttttgtctcagctgggattacaagtgtgtgcctctgattgacatttgctttgagtttgccttacactggaaacatttaaatcaattaaatcaagtggccaaaggataccctcctcgtatcatccactcagtaccggctattctgtaatgtgctaaatcaagctaagaaactactacttgaacaaccctatcactgggtatatgacacatcaaggttgaaacctcttcgaaaaaaaattgtagatactgacttaataccagggagctgggcaaattgctctctcttgttaaatcacttaatttgacctttcaaagaacaccagctttaaacccagctactttctgccacccacaggaactgagtgagctcttgtgagcaatgaatgtgtgaaatccttgatgctgtcttttatcactagctaggactgataggccagctatttgaccacaaagactgagaggtcttcctggatgaaaaatggcttcagggtggcaagaaggttcatgaaagcaagttagggtgcctgccaccaagcctgaaaagctgacttcaattccagggacccacataatggaagaagagaactgattctcacaaattttcttctgaacatatacacacaaaataataaatataataaaaatgttaaaatccagcttcatggatcatgataaagtctacattagatatgaaacagtgactgtaaaatatatcactaattaaaacctctttctggcaggtatgtttgctcagaagtttcaatgatggacatttaaaactttctttttttgttttttttatatatttaaattacaaacaagattcaattacatggcgatctcagttctcttctccctcccttcctcctctaccaccccccaactaaaatcctacctatcctaaaactttcaaaagataaaaccactaacattcaaagtgactcaaggtatgccacttaattgttgtgccaaggggacacacagagaggacttctcacctttaatcataaggatgtaagcacttatccggagatatgaaaactcccagaggttgtactcatgcaaaaagaggtggttaccatgcattgcctgtggcatcaagaaaagttgctagctggcaggccagtgggaacatctaaatctaccagttttattgacattattttaaattacattgaagcatatctcctggaataagaaaatcttcagccttgctaaaggacatttagctttgctaactggtatgcctgatgctattcaaagtgataattgccctgcccctgtcctcaaggtaatgcagcaggtgaatgaggccctaaaaatccattggaaatccatgtcacttggaacttaaccaacagaaagatggaaacgatgagccatgacacttagccagaatacattaagagattagtctaatatgagaaaagtaatgagctttgaacttcacatatgagggaagctcaaagatgaaagctacaattaagcccccatgaaattatcaaaaaggacttcagatattcatagagggaaactgttcccacattttgaatatgaaaataaaattaatcaaatgtaataataaagttctaaactctattcgtaagtttgcttcctttatgataaaaccaagccctaaggacactctgtatctctgtcaaccagaagaattaattatgacaaagacatggaaaagcaaggaacagtgacactggcacttaattctagtacttgggaggcagatgcaggcagagttctgagagttagaggccatcttggtccacatagggagtccaggttagccatagctacatagtgaaatactgtctcaaacagacagatagacagacagacatggagaaatcagggtccaggagccaaatcaatagagagacagacaagctctgatgatgtccctaaccgctcatgttttcttgaaagttgctgctgtcagctgtggacgcactagcaagaagttacactcatgatccctctaccttaggtggaaacctccacggaagactcaagtaacctcttggaaaaaaaaaaaaaaaaaagaaaacctaagctggtcgtagtgactcatgtctgcaattctaacactttggagcgagaggcaggaggatcaggagttcaagttaattctatgctacatggaaagttcaagtccagattgtcctatgtgagactctgtcaaccaagaaaagaaaagaagaaacccaggtgatatcttttagataatcaagaattatattgcagccagcctatgctttctgtttttcttgactccaaattaatcagtctaagctgcttgaagattaggatcttcaatttttgagtttaattgtctggcttttagatagggaaagctctccctgtgataaccatgaccaggccaggagcatccaattatacagcaagagttcttcaaatagacttgaatctggaaaagtaacttttccattagcatgttagagagtgcttgacactttcctcttactaagaggaccctggaatgtttctaacagtggctgaagcaaaacagcttttttaaaaccttgatttgaaaatctcagtgtgggttgtggggttcctgatagatttggatagctaactttcaaaaattttcagctagaaaaaaagagcagccctatgcattgaaaaaactaaatgatactcatggtactttctgaatgatggcttggacaccatctccaagaagtgtgttgcatgaataccactcaaagtgcatccatgtggcttagcttgtaaaataatcccaatatgatagaggcatattcagtaccatggcaatcactgtgggtttatgcaagctgtgagtggcccagtttgccatagaattagctaaggaaatgtaacgagggtcccagttccttccaagatgcattgcttctctttgccagtactccccatgaccaggactctgtgaaagtcaacacggcctgtaagagagcttgttagtagtctactccacagctgtcagcacttcaggagctgctatcactgggttgaaattgtaagtagaagctctaggaagcgcacagcagccactttgaataaaacctgacagaatatcatcctcttcaatgatgagacaacacaaacttgtaaagtggttttcccaaacctgatggcctcccatattttgactgctgtccttaggacagcttgtgttcatattaagaagtgttgagtttatattatcaatctttcaaaaggcataactgaagctgtgaaggacctacttaagcacacagctgctattgatgtgcctgaggaatggatcctttcagtaactggctaaaaacagtccctattgaatgcaagtccgtatgcttagtactgccattttccttttatttctcctgtttgggtgccacttaatttactgtattcataccagtatgtaagtgcctatttcagtctttggaaaaaagcataagaaattatattttctgatcttgttaaggccttccatctcaagatttctacagcagctcccatcagcaggaaatagtttctgatgatgggaccgtgggaactgtcccatctgtccatcactggattagcttcaccttgcctctggatctctgtttttgcttcctccagtaactttgtgacatgtttgattttgttatgaacttgattggattaagcaatacctgtggtactagtaaggcacaagtttggatatgtttgggagagtatttctagagacaattgagaggacacatcttggatattgcatcttctcttgagaatctgctctaggttgctttattattgcttcaataaacaccatgagcaaaagcatctcagaggaggaaagggtttgtacttccaggtcctaatctattattggggaagtcaaggctagaatttaagaatgagctgaagcagaaagtatggaggaatgctgattactggctagctttctggcttggtcaactatctttttctatagctcaggcccacctgactagatgtgatgccacttacagagagtgtggcccttacttatcaaacatcagtcaagaaaatctcttgcagacattgctacaggccagccagatggagggaatttttcaattgaggtttcctcctcccaggtgactctagggtgtatcaagttgacaaccaaactaaccaggacaccatcctatgaaggaatactggaatgattaaagagggaaactgaaatggagccgagtgacagaattctcctttctctacctccttattcacccatatgttgatcaggcatcctcgtggttcactatgcctttccagccaggatttgagctaaaaacaaaacgcccccccaaaacaaacaaacaaacaaacaaacaaacacaagttcttcctttatattgcttcttgttatgtatttggtcacagaattaaggagcagaactaactcagaaatttgttatcaagaagtgggattatgactgccataaacctgaccatgtcctccacaggtctttagaacttatttgtgggagtcatttggaaaatgtgtggagttgtgggttacaggagccctagaatgctgtaaacagagtttaatggactgttctgctgggagtatagaagctgctaggacagtggttactctctgtatcttggtatttactatgcaatgtttcctcatatctgttccttttaagggtactagcttgtagtaactgctgtttcaccctcaacttcagtgagatgaaggactttagactctatctatgtaaggtcatgtttgacttgttactcagtgccagcttatttcacttaatatgatgacccatagtttcaaacattgtcacagatccaagataaatccttttcatgaatatagatacaatattttaaaaataattttaaaccttttataataatattttgtcaaacatctggtaaaatgtaaaatctaggttgtaattcaaggttctcagacttaaagttatataaaatgaacattaagaaagaatcaacaataaaataatttagagcagttttcataatcaaaaaggataatagaaatatcaaaaaaaaggccaggcattggtggcacacgcctttaatcccagcacttgtgaggcagaggcacgtgggtctttgtgagttccagacaagcctggtctccagagtgagtgccaggataggctccaaagctatacagagaaaccctgtttcgaaaaaccaaaaaaaaaaaaagaaatatcaaaaaaaaaaatccaccctgtagggagagaccctggatacctgtacccctagaatgaagagagaggacagaaggcgctcctcttctctctcagggttcaggccaggtcttggaagcatctgggatcttggcggcttggagtgcccttgtgagtataacttcttaataaactaccagttaataacctatcctgtgttcgatcctgttccttatcaccaccctgggagaaaacacttagcatcttataaatgaaaatgaacatatgtgccaaatgtcccttaaaaattaaaaattaagaaatacataaattaataaacatggtaaaatgactgaaaactatttcttcagaggagggcacagggaaaattgtcaatatactcacatggaaataagtaaggatgaatatttataagaaacaggtatgaatgtgtgaatgaccaggtggttcaaatacgccattgacatttgctagtaaatttggaatcttccttaatattcagtacaatacatttttgaatgtgtaaaatgtttatgaaacattgacatttggggacaaaacaagaataatagtgttcagcactataaacccaacaattcaaaccccagaaggaatgggataactgactagattaaatgatttatagcatcagacaggagcacgtgctcaacattgtttttgaaaagtcttcaggaataatagcagcaacataagttacagaaatctcaaataaggaaaccaagcagaataaccattctagatgctggatgacattcctaggatgacataaaagagccatctactcatgccaaatagagatagagtcagcaggccaatgaaagagttcatcaaatgtcacatggcaaatgaatgattacattggtttacttatgggatcgtgggaactcacagggagctgtgtgacagccaagtcccatgcccagccttaaaataaaatcatataattcagcactatttgcagttgtcaggagggagtggtcattcaaatctcagtagagggtcttatgagttgcctacttgccctgcttctctttaagagggaatgccaataacctcattattatcaccttagacctaaccacctacgcaatgttctgctggctttgttgccatgactgtgggccccagtttcttgtaggctcccagagttgttctgcatcaacatggcgttggctatatataaaccttggagtaactagttataatacagagcacccctctctgcctccctccctcctgtttttacagtctgcctcctacttttcagtgttccctgagtcttgtaggggctgtcatctacatttacttccactcttctaggacttggaccagcttgccacaacaacagacacttaaccttcgaacaatagaaactctaattaacagggcaaccacaatagtgagggcgagacccaaggcacagacacccttggcatccaaatgttctatttcatgtgttgctttaaacatctgagtatactactaacatgtgccccattattgagtgtgcaagcatagcatgctgtcctagtgaatgtatatgtcccagcatgagtggctctatttcctagaccaggtggtccaagtcactctaatattgggggtagggaaaagtagagtatatgagatcatgaatacttaatctgagaggcacagaacacacacacacacacacacacacacacacacacacacacacacacacacacacacagacaggagtttgactggttatgagtctcttcagcaactaccactacatgtaatcaacgcttcagctacagatgataatattagtgacctacaggcataagtttagagagaggtttcacagacatatcacctctgtctaacacagcaatagtagtagtttccctgctgtggaatatgatcagccataggttacagtatcaaactttaggttttctcctgtagccttaaaactaatcaaggagtgttgggctgcacccataacaggtgtgcccatatttccagcaggcacatttagcttatcgttgtcagcataacacatgaagtccatagtcaggggaaaggcctgatgacaattagtccccagtagcttccacacagcctttacttctcatgttttgagatcagcgcatacaatgtcttcagcactagggatttaccatttattttggattgtaaccaatggcagggggaacagcctgtggtgtatatggggctttggtggtctccttgaccaacagcttatatcaagaaaactcatccttctttctggactttttattcagtaacctatggtggctgggagaatttttttttttctcgtcattcagggtgacttctcaatttaaagtctttagcagcctggatttttaccagtctatctagcccagtgtccttgggttttctcttcccagttctgagcatgtatgtgaaatgaatgtccttgtgactagcaatttgggggtgagggtgatggtggggaatggtacccatatataacattgagttagataagaccctgatgttggcatcaccaattgctgaattacaggcaatgctttcaagagtcctttgaagcgcccatacagacgaaggaacatatgcagcttttacggacaggtgtagtccctgtgtaggctccttgccaggctcatatgggacaggtcaacttgcattcttcccccaaatgtagcactaaatcctcttcaactggaaattagcgtcatgtatttggacagcaactcgaaagtcagactatttcatcagaaccccagtggctttagatagttttcagcctgcattctcgcctccaccacacttcatatgaacgcagtgagcaccctctagcggtagatgtatgcaaatatctttatctgtttacttttctcctttctccttctctctttcttttctgtgcactttttaaaaattgaaaatagattcctctctaatacaatacatcccaacaagttttccctccccacatttctcctagctctatcccggcattttcaactccctctgcttcctcttcagaaaagagcaggactccaagagacaacagccagccaggggggaaaaaaatctaaggagacatgctttctgatttccaggactcaataggcttctacaagtactgggggctctggcccttcttgaatcatgttatatattttctttcatacctgttgtccccacattagctgacccagaacccaatagttcttttttcttactgggctatctataaagtcaggcttctcagtattgcagtcagtgctcacagaccaagtgacaagagttattgctttctgttctcaacttggccaactgataacacttgcccctttccctctccagccacataggaccagtgttcatttgtgtggccgtagctgcctgcccccatggtgctatcagtgtgccaggacacaaaatggatagtcctttttagcactctgtcttgtgtggctattggtttgataactacgagaggcttcatggctggaaagaacactggttccagtatagcctcaatagcatccatcacaaggcatggagacagcacccatgaatgaaccagcagtttctcaattctccctccacggctgtccagcatggataagctgtttttattgttactaagatgggatcgtcaatacagcccatctgtctctgcccttttttatatgactagcagttgctgtttgtgtaccgtgtacagaacttgtagccctgtccacgctcaggagtgaaaccttattggaattgtgagctcactttctgccacagcctgtacacctggctctcccagcttttagtaactcccagaacaaaggaaactgtagttctagggcacacaccttaggagccagtcctatgtatttggctcaaacattcccagccttttctttctcccaattccaagtggtacccatcttaaaacccaagttatagaaaggacaggcaacttgaggtaaatgtgttatgaaaacactgcaaaactccccaaatgtccagagatcttttgcattagtaagcaaaggctggtgtagatttcagagcaagcaaaggctggtgtagatttcagaaaatagcagatgacacccatgaattgactgcaagaatccttggagaataaaccaggaacagttggagagcagccttgctctgaggtgcctggtggcagaaaggctccagagtttcaggagaaaagaaagaatactttagaaggctgtaaacagagagaggggggagggcgctgcagagagcccaattccttgtggggtggattcagcaatatgtgttgggtgagtgcaaacgtagagagcagtaactatggctaaggacagagaaaatctcagaaaatatgcatggctacattcagtgaaagcaagcaggagagaacagaacaggagaaagagagaaaaaccgtccacccttgagattgccagtccatcaaggccactgatgcttaagtggcttctatccttctcctcttcctcctcccaccccctcttgttttgctgttgtcatttttttgagaagtatagatggtagtggaagctgcctgcctgctagaaatagaatccagggttttctattgagtgtttttggtttttgttcaaagtctagctttttttgtttgtttctaatggtctatccttctggcattgcaggtgtgttcaactatgtccttgcccctgctcctggcatggacaatctttaggtatactacaaacctcccagacacacgttcagggtgtgaggctgtgtgagagtgggtcaggccattgaagaacagatacagttgacttctcctcagcaaaagtggaaagcagaacagtaaggggcagggacagccgtggagggagaattgagaaactgctggttcattcatgggtcataaggtcctttttttctagggatgagtttcacagatgtcctagagtagaccaggtatcgactgagtgtgttctagttttctttcctttgctgcaataaaaactatgaccaaaagcaactttggggagaaaagttcatcgtggagagaaagcaaaggcaggcactgaagcagagagcatggaggaacactgcttactggagtgctttaaaatcgtaactacagttgtctcaccacggagagaccaatgaccccatagttgttttgtcttaagactgggagcctcatcatttggaatagtctcatgctaactgtctcccactggaaaggatgtcaaatccccagttcttcaatcctcatggcaggtgctttggctgtccccacccagtgccccaaactaggaaggttcctggagagatgctggtcattggtggaaactggaagcctggtaatgcaggctctgacatcagctaaggaagcatcattagcagcaacagtgtaactcagtgaggtcagagggaaggccaagcaagcaaaaggcctgtcatcttctttcagccatgcccctttcattccgggctttgacaagaaggtgccacccacacgaggggttggtcttcccacatcaattaaggtaatcatggcacttcctcaggtaggtgccactcaggtgattctaattgtggcaagttgataataaaaccaaccatcacacattgcatgtgatttcttaggcaaagcgagacagacctttggcatggtccatctggacttgggtcctctacacatcttcaggcccatcctgccttgtcagctgagggcagatcccaagcaccacacaccttcatagtattcctttggactcttccatgaggagtcactatcatactcaggaatactaaggttaagaccaaatgcaggggtagaatggaaattaatctgaagaaagagaaaaagggtcagggagaaaagcgaactgacagtgttgggaggaagaccacaatgagagatgtgttaatggtttcttggagtgtaatgtgtaggggaagctgtagccacgcctacttaggggctggctacaggtgtgcctgaccacgcttgcgagggcgtggtcagggtgacgtagagtgactgcgtttttctcttttggtttcactttggtacttactggacagactgctgccatgcctggctagctcagtcggtagagcatgggactcttaatcccagggtcgtgggttcgtgccccatgttgggcgccaggggaatgcctacccaaggttcatagtagtagtaacctctctttcccctggcgaccacgaaggcaccaggaacctaagtaccaagaggctagaggttactactactatgaaccagaaccttgggtaggaagagcattccgggagcgaaggggaaaaagggacatacttcctgtttcctcgcttagatatgagtctccttgccatgtcaattcctgcctggatcatcacttctctactacatttcccagaatcctctttgactcctagtccttgcttgccattgtccaaacagtattttattcaacaatcaataagataaacatacacagtaatgttatgggaaaaagagggcagaaaggggtttgtatatacagtccaagcattactctgatttgtttctgagaagcccaagggcttatggagagctgtccaagactctgaaatcagtggtgctaatatgctttgcctagtgaatggctgtgtcatgctaaatcttatctcatgtgcattgctttcatgggccttcgacatcagtaacggattttgaagaaactgagagttaataacaatgtaaaattcctaagtttagtagttgcagaaacttaacactaggtggcactcacttaccttaacataacaagtgtgtggttagaatgtgtgcatgcttttatttcctttttgaaaactgggtcagaaaaattgctaatcccgcgagttttcagaaaaagtgcacgtgtaaggatcactacgagtaattactgaagtccagtaagcacttcaaaggaacaccagcagagtttgatttgtaacagttgagaaaagggaggacaagaaaaccatgaagagtacccacaatttctgaatggaagagctgcagacaagaggttcagtaaggaaaacgtcccagctcaatgataaagtgcttgccatgcttgtatgaggaccttagttcagactcccagaacacacgtgaagcctgacgtgggaacacatacatgtaattccaggactcctatcctgtacctagttgtgagacagggactggagactccatggaagtctgttcatgggcgttcatgacataagcacaggtgaagagccagaagcattgtctcaaacaagacagaaggtgaggggtggcacccaaggctgtgctttgtcttctaatgcatttgtgtactgtggctcctgacacccacacaccaccccccccacacacatgaggagacggatacagacacacagacacctgcacacacacacgcacacacacacacacacacactcacacacacacacacacactcacacacacacacacacagacacacagacacacacacacacacacacacacacacacacacacacacacacacacacacacagatacatagacacaccgttgcagcaggcactcttctgcttcctgacattaaagttctttcaacttactacaggtgatttcggtcataacagtttactgggaaatgggaaagaggaagggggagcacttttctttttattcttctctcatgtattacatcctgtctgcagttttccctccctccactcctcccaacccttctccccctctcacccagatccacttctcttctgtttctctttaggaaatagcaggccttccagggatatcaaccgagcatggcataacaagttataacaaaactaggcaaaacactcatatcaaggctggacatggtaacccagtaaaaggaaaacgggtaaccaaaagcagacaaaagactcggagacagcccctgctcccactgtcaggagacccacaagaacaccaaactacacaactgtaacatatatgcgaaggacctagcttagacccatacagggtcgtaatttcctcttcagtctcttcgagccactatgagccctggttagttgattctgtgggctgtgttcctgtgatatctttgatccctccagctattctaattcctcccctgactcttttgtggggttccggagggctgcctagtgtttggctgtgagcctctgcatctgctcctacccattgctggatgccacctctttgtttgtttgtttgttttgttttgtttttttctagacagtgtttctctgtggctttggaggctgtcctggaactagctcttgtagaccaggctggtctcgaactcacagagatccacctacctctgcctcccaagtgctgggattaaaggcatgcaccaccaatggattccacctcttgatgacaattgtgctaggcatcatcgatcagtgagtatagcagaatatcattaggaatctttctttctttctttctttctttctttctttctttctttctttctttctttcttttttcgctagtcttgtttggttctatcctgggtctctgtgctgcactacctctggttcctggccatccaggcagtgtcaggagtgggctaactcatgtaaagtgttgtggggtacttgtgcactgtgtggaaatgtgttgctgtgattggtgtaataaaaagctgaatggccaatacctaggtgggaggtataagcagtacttcaaggcagagagagaactctgggaagaagaaggtggagtcaccagccagacacagaggaagcagcatgagcagatggagagataagataaagagccaggagatagagcatagattaaaataaataggttaatctaagttaaaagagctatgggacaagcctaagataaggctaagatttcataactaattagtctctttgtgtcattatttgggagctggctggtggggctgagactcattctaggcaagggcttagtattgcaccagccatttgttggccactcccacatgttctgttccatcattaccccaagacatcttgcaagcaggatagatttttcaacattcttttattttaaacatgtatttttactttgtgtgtaccatgtgtatgcctgaagcccacaggggccagaagaggatgttatatccctgggactggagtgaaagacagttctaagccaccatgtaggtgatgagaaccaaacctaggtactctgcaagagcaacaagtgttctttttgttttgttttttgagatagggtttctctgtgtagctttggagcctatcctggcacttgctctggagaccaggctggcctcgaactcacagagatcttcctgcctctacctcccgagtgctgggattaaaggcgtgcgccaccaacgcccagtacaacaagtgttcttaatcacagagccagctccatatgccctataatttgattttgcttaccctacccactgctttctgctggccctacacactccttgctgattcaactgccttcttcccagagtctcgttctctgtatatacgtcatatatattccattactctttttgtcctctcccaagagttcttccttccctataatcccctttctgcttctgtgtcctatccatgtacacacacacacacacacacacacacacacacacacacacacacaaatgtatataaatgcaaatattcataaatatttttatcctttggggtctctggtgtttggttctctctccctcttgatttcttttcatttagtttgggatgccagcctacaggttggtgctggacactcccaaggtgtgtctccttctttggtgaagcctttctgggagtcctttcacagaggttatgtccagaggtgatcccaaacctagtcaagtttaccaagaagaatagtcatcacagaataatcgcttcattttctttgttcatttatctgctaatgtgctctcctaggctggttttaaatctaggcatttgtccatagtacagcaataaccacggatgggcaagtattttacactgacatccatgaatgacagtccttcagatatacactcaggcacagtagagatggaccatatggtagtaccaacgccagtgtacaacagtttctttctcatttccttgccagaatttgtctctgttttcttgatgataacccttctcaacagggttgaaatggaatctcacagcagtcttgtttttaccaggtgctccaatagttttaaaatatttgttgttcatttgtctttttttccccttaagaactgtctattaaattcaacagtccatctttaaaaggatttctctattttcattttatgtgtgtatgtatttgcctgcatctatgtctgtgtaacatgtgtattcctggtgcccacggaaactaggtgtgttggatctcctagaaatggagttaaatacagtgtgagctgccctgtgggtcctggtaattaaacccctggtcctcttcaagaggtggttaaaatggctcttaaccactgagctatctgtccagctatttaatatttggagttttctatagatgttagatattaatcccttgcccaatgtattgttgataaggatttccctgtcatagtagtctgttccatcattatttcctttattgtgtaatgctttataagttgatacaatcctatctgctaatttaggagttattttctgtgttattgtagattgtttccaaaaatccccacttaagcttctatcttgaagtgtgtttttccttgatcagtttcagacttatactaaagtttgttgtccattttatattgatatttttctgcaaggtgagatacatggatttagattcattcttcaccatgcaggcatctccttttacttactactagttcctacagatacgcctgcttctcaagtatgttttccatatatttgggtttacagtattcatattttagtgcaatgtctgtcatgaagaagcagagagagagatgaatgctgggtgttccacttgctttctgttttgtatttagtaaaggattcaagcccatggaatgatgctgtcactatttacagtgggtctctacctctcagttaagtatctcagggaattatctacatagtcatggtcagaatttgtttcccaggtgatcacagatacacccaagttgttgtaaatggcttttaaacatcacacacacacacacacacacacacacacacacacacacacttatgataaatctgtccacgaaagctgctgagctccaccgccaagtgtgcactttatgccagccacccgcctgagttaagacccaaattaatacacagaaacttgtattagatacaaatgctgcttggccaatgactaggattctcatctgttagctcagtcttaactatcataaatctatatattttataagacttatcttatcggacaccttccattggtgtccttccttgctggtggatcacattgtgctgctggaggaagagagtcgaggggaaaaagggacactttctgtttctccttgcttaaatatgagtctccttgctatgtcacttcctgcctggatcaccacttctctactacatttcccagaatcctctttgactcctattcctgtctaacttgtctcattgtccaaacagaactttattcaacaatcaataagataaacatacacagaagtactttccctatcactcttatagatatttattctcagcaacgtgattgaccaaacctaaggatgtcaatggcgggactaggagttaaggaggattctgggaaatgtaaagaagtcttgtgatacaggcaagaagtgacattgcaggcagactcacatataaggaaggacaagaaggaagtcgctctcttgctcttcctctctctcctgttctctgctctggagccaccatgtgatccgctgggaagaggacgccagcggaagtcgtcctctataaggtaagtcttataaaatatatagatttatgataattaagactgagctagcatataagaaatcccaatcaattggccagcagcatttgtacctaatataagtgtctctgtattacttgggaccttaatgtggcggcagacagaacttgggtggcctggcagaaagtgcccaagtggtggcaaggctcaagtggctttggagtaaagacttatcgttacaaatttgggttataattactacattttattgaaaataatttttctatacaatatattctgaccatggtttcccttcccccatttcctcctgtattctccacagctacttcccttcaactctacaccatttttccttctcactattattttaaaaatcagagacttactatgtagccctgactggcctggaactcatagagatctgcctgcttctgctttgtgagcactgttgttaaaggcatgcaccatcatatccagccagaagagtgttctcatataaacttaatatctgccacatcacatagaaatacaatcactgtgagtcattgctgaatgtggtccactgctggtcaaaatgctctgtgatccatgacagctatttagggtgaaaaccaaatgttatgtcaaagctaggttgatcagctttgaaactattaatgaaccccgttaaatattttatagaatattttaatgtagcctcagccctgagaaacagtgggttacatgtggagatgatgcctaaaatgaaagaaaaaggaaaaaaagatttttgttttttgtttcacagtactatgtatgggtgaactgctttgttctttgataaatttagctgccattcattcaattaaaagtcaagaaattcatgaaggagaaaagctttgtgtattaatagaattcttttttctaagagcccctttgaagcctctgctcttaattaagcttttagacttttgtccccaatggtattggtccaaaaatgtaatggaatgtatctctaggttccataggaatgaagcaacaccaggaacagacttgcttgagaattagatgccagaatattacaagacagggtcctagaaaatcacctttgcacacaaaagggagtggaaaagccacaatggaaaatgagttctcaggtattcacaggagatctttaagtgcatgaaacgtatttgtatgcatgctttagagactaattaagtattgggatttctaaactatatatgcatgtatattattttgggaatggaggtggcattttttgtcataagcaatgtgctttctaagaataaattaaaattttgttatgtgtatgggtattttgcctgcatatatgtttgcccaccatatatgtaactggtgtccacagaggccagaaaagtgcatcaaatcccctgggagtggagttacagaccgctgtgagccacgctgtgaatgctgggaatcaaacctgggtcttttggaagtgcaacccgtgctcctaactgttgagccatctctctctagccccattcaagtacatggatttttctgcagaaaatagtagcattcataatggatttatctaaataggccttccaatcctggaagatggcccaatgagtaaagtgtttgctgtgcaagagtaagaactgtatttcagaccccagaatccacaggaagccaggtggttgtagaagcctacctagtatctcagcctatgggaggtggctagggtcagtaagaaaccctgactcacaacatagggtggagagcaactgagggagacccctgctgttttcaatctcaggcatccacacacagacctcatatacacaccacaccacacacacacacacacacacacacacacacaaacacacaccgcaccacacacacacaccacaccacacacacaccatatccacacaccaacaccacacacacacacaccccacacagacacacacaccacaccacacacacacatacacaagtcacatacacatccatgccacacacccacaacacatatcacacacacacacactatgtataccatgcacacacactatacataccacacacgccaccacgcaccacacctcaccagacacacaccatacacacagactacacacaaacaccacaccacacacacacatacacatacacaccacacacacaaagcacatacacaaagcacactacacatatacacacaaacatcacacacacacaccacacgtatactttatatatattatatagtatacagcactgcctcttaatagtagtgctgtttacaggttcatagttgtacaaggtacaatagatagagcctgcagacattgaaccatggacattgtctcttgtttgagaagactagcagtttgctctaacagtctcccatttcagtatagaaagcttttgaggttaaagatattctataatatgtacttagtgataatttattgataagtattttgttcctggtaaaatacttcttgatgtttctctttctttcaatttatttgtttcaaatatttatgaagaagaaacaaaagttactttagtagaaaatctcaatattttctaaagagacttctgtgaatttccccttactcagcaccagtgttttgaaatacagcctctttgggggtttatctcgcttcaatacagaaataaccagtttggtgggaaagcaccttgtagagttagaggacccagaaagaaccctacagcttgcttatgtttttaccctgttgttttcagaattgtgatgagtccattaatgtatgcagaagtctagcttgattgtttattaatagatgtggtttttactagtaaaaagatacatgttagaaaactcactatttataaaatattttcaggaaaaaaacacaccgaaattctaaggaaatttcatctgttcaaattatgtgtatgcctttattatttgctgactcttaggcatcataatgtaaatctaaatttgcagctgctcgttgtacaaatccaatttccaaggaaagtaacattctgaggtatcaaagatcagaacttcagtgtatctttttttgtaggacacgattcaatccatagctgctatctaaataatttttatttattatatttacatctttcatagtttctttcactagagactcagtctttaaaatttacttgaggggtctgggcagattggctcagtaggtaaagtacttgcttcagaagcatgaggaccaaagtttcggtacccaacactcagataaaaaagccagctgtagtgacaggtgtctacaatctcagctctgggtggggggaggggcacagagataggaggatccagaaattctggccagtaggtctggccaatcatttaccttcaggttcagtgacagacagtgtctcaaaacaaaaaaatgaggtgggtagtgatagtggaacatatttgatgctgacttgtagttgccacaaaggaatggcgttgtgcatacaccatcccacgcaagcacacaggatcacaccaccctcactaacaaacttatttggaaggacttttaataaatcattgtatacatagtaaatgtatcctgctttattacgttgacttttactatacttaaaaaaaaagtcttaacagtaccgtgtagttgatgaataaattcaagtcagagtgaggaaatgcatgcttgtcatcttatgccagagagaattctgtaattctgtaatttaattttttaaaaatttacttttattttatgtgtatggctggctgtgtttgtctgtgcacctcgtgcatgactgttgcgagtggaggccagaagaggtcattacactccctggaactggagtagcagatggttgtgagctgccttgtgggtgctgggaattgaactcgggtttctctggaagagctccagtgctctcaactgccgatccatctttccagtgtaattccataagtttttttattttttgattttttgtttgtttgtttgtttgtttgtttttagctactgaaatccccacctcccccaggttcacttctattgcaaagtataatcttttttaaagccattttcacatcacggttcctcaaacagtatatgacaggattgagaaggggaacaatgactgtgtagagaacagacaccactttgtttgaattgtaggcatacatgagcttaggacgggcatacgtaaaaagcgttgtggagtaaaaaagtgtcacaactgtcagatgagaggcgcaggtggagaaagccttttgacgaccctgagctgatgggatcttgagaatggtgatgagaatgacgacataagatgtcactaccacacaaagaggcacggcaatgaccatgagggccaagaagaagtctaccagttcagcctgggaggagtcctcacaagagacattgaggagtggagagatatcacagaagtagtggttgatatgtggtgtgccacagtaacgcagccgtgctatgaaaaccatcttaatcatggcagtcatgagcccacagaaccagcacccaccagccaggattccacacagctgattggtcataatgacagggtagcgtagtggattgcaaatggccacatagcgatcaaaggccatgacagccaggagtatgtactcagtgcagacaaaggttacaaagaagtaaagttgtgtcatgcagccattgaaggagatgctcttgtccttgctgaggaagtttaacagcatcttgggactgatgacagtgacataccacatctccaggaaagagaggtgacttagaaagaagtacatgggcttgtgtagttgcccatcgctgcggatggccaggatgatgagaagattctctgccagtgtcagaagataggttaccaggaagatagagaagagcagaaactggaaggcaggtcgtgttaggaatccaagaagaataaaatgtgttgttacagtgcgattgtctacatccatagccttggtgatcatgactagctgcgggcataggcaaagtcagttccttctgggtgctaagcacctccctgagacccattatactgaaacctacctctagcgattcataacgagagctttcctgcctccatgcctttatttcctcttgaattatgaactaaaactcttgaacagcaaattaacctagggagtttgtattttagttttaaaaatattagttcaaaaagcgtaacttgctcaagatcacacagcagtgaaattagacctcccacgcctaagcactgtgctttttcaatacgacactgttgggcagacggaagtcccttcataccaccctttgactataggcaaagcttctccatctatagcatgtaaaaagaaggcagaggactcaattactttttctctgggtataattttatgatgccggactaatttcatggccccatttatcaaagagacaatcatatttgtttaatccaaacatgttacaaagccttaataaagcaccgggtgagcatactcacaggttaatagcaaatagaagtgcaatgtgaacagtcaccatcttctcaaaggatacagctgaatgaaataatttgaaggacatttccttcaatccaattcactgtatagccatcttgatggaaaatttggcaaaagtatgtttaaatcacacccttgtctttatctaagtggacacattatataagctttcaaaatattagttttttttcccctcaggtaagaataaaaggaagatattcgaattttgtaaacatccaatggggtttagagtttaagttcccatagacatttgcacttatctttccaagctactgttcttagccctaaatcaacacacattctcttctttataattcccttcccaaggatacaccccatcctacaataaccaaactctgaaaaaacatagtggtgaaaatgtcagttattgttaatggcaagaaggaagaaattggacaattttctgattgttgaagaattcaccatccgtttggctgcagtgttataaaaaagcattccttcgagtgacacttcttatgtggtaattaagccaagcctaggctctctctgggatgggctgacacttgctccagaatctctcgtattggaggtagttctttgttttcagacctcttaggatctatcattttgttcctcatttctcaaaagctttgtttgtgagttacaagtgtgtagaacaacttggggaaggctgttttctaaggaaatgggcagagatgggggagggaaggagggggagagagagagagagagagagaaagagagagagagagagagagagagagagagagagagagagagagagagatgtctatccaatctattcccctcttttcattatattgcagatttacgatgataaaagcagaagcttacggagaaatgatagatgcttaggaatgaaaacacacagattacaataactcacagagcacagcaaatttcaccattgttttctgatgctatactatttttaaattatttttccatttattgtgtgtgtgtgtgtgtgtgtgtgtgtgtgtgtgtgtgtgtgttgaaatcaggaaaacgttcatgacttggttccatcttttgccacatggactctggaaatggaactcaggtcatcatattttgtggcaagcatctttactcactgatctgtctcagtggcctagaataaggtttcctatgcaatatatccccgtgcacacacgcaaacacagaaacattgatgaccacagcctaatgttgactatcagaactgtggggattataacaaagtgagctttgagactccttagatttttccttcatcttccttgtttttttgatctctgaattcaagatcatttgcaaatcatttaggttaatttatttccctttcttttttaattttctttctttttttttttctgagacagggtttctggctgtcctataactcactatgtagaccaggctgtcctcaaacatacagagatctgcttgcctctgcctgctgggattaaaggggtgggccaccaccaccaagctaggttactttctattaggctttcttcctctacatttccatccaatcatcccttctctgccaacaagggttatgttgttgttttcttggtctcagctaatatgtttcatgttctagatccatgagcttgggtcaggtcctgcaaacatttttaaatttcagaaaatgacaggtgaggaaatttaccctgacgtcttacattcttctgacatctcctctggcctctaaagaatcttagcagatacacggatctaagaacagctctagaaatgcctccaacatttctcagtagcttcacaatgagcacagtcattcttcggatatgcatcttaaaagttgtaagaaaatagaagacgatggaaacaaaagcattttgtttgatttgaagagtcagtaaacacaaagggaatattttcattgaaactgtgtcttattcattcctaccttctcaacacccaacaggaataggaatgtccaaacaagtattcagaatcagagataaattagcataagacaagtggaaaaataaaacaaaagacagtatcacactgtgtatccagagcatctgtctgagccactccatcctctgaccatgctttgagaattttagtaattgagtaaaacaaataaatagaagaacaatatgtccaaattgggagctccaacctatcatcgtgaatatacatatgaactatggacactgaactataatattgatgatgtttatgtaattgctagactttgataagcaataaaatatatgtaaactgagagtgtcttaacaaacacacagagagcctaggctcctagtctccagggctgggttgtttgagtcatcctaatagtttctaagactggctagacagtccttctggcaggcacgagagagagagagagagagagagagagagagagagagagagagagagagagagaggctttcatactaaacaaccgccctccttcagcagctgagtgtcctgggcgtggcagcaacatcactactgctgggggctgcttcattctgcatatctgaaagaacttctgatgccattcccagcaaactccacaatccgggacttagcaggaataaatactatcctgaccacttgatctagggaatattaagtatttatctcatggtcacactgccggttgtttgcttgcttcagtgacagtattaaaattaaggatcaaattccattttatcgcaattggttttcatatacatacatacatacatacatacatacatacatacatacatgagctactgtatgagtgcggcacacccaaaatatggagagggagaaagagagagggagagagagagagaaaagagagacaaagagagagagagagacagagagacagagcgagacactcagggtagtttcaaacttacttcctcagtcttctgccttagtctcctgagtgtgttgtctttggcactcatgaccatctcattgtctttctattttttgatactgaaactaaagttatgcttttagttttagtgtaactctatatgagataaaaacttagtagtaaataattaaagttttgaaatgaaatgaatagtagtattataaaatcagtggtagtttagtttaaaaatctttctttttacaagatgagatgatttcagatgttagtgtttttcctaaagttaaatgacagaatagccatttattaatgattacatgccagccactagtaatctttaatcctgattatcttacagacttaattaatttaatgaaattaattgtataacacgatgggaacttgatggacaaattaccttaacttttagctttatttcaacagaataataaaagttaatgtgaatcttgccaggggtttgtggctcaagcctttaaccccagcactcaggaggcagaggcaggcggatctctgtgagtccgaggtcagcctggtctacagagcgagttccaggacagcctctaaagctacacagagaaaccctgtcttgaaaaaccaaaaccaaaacaaaataaaacaaaacaaaaaacagttaatgtgaatcttttaagcatgactttttttcttaaaaatgtgcttcacaaacttttatagtggaaagtttattgcataattataaaggtgtgtgtgtgtgtgtgtgtgcgcgcgtgcgtgcgtgcgtgcgtgcgtgcgtgcgtgcgtgcgtgcgtgtgtgtgtgtgtgtgtgtgtgtgtgtgtgtgtgtgtgtgtgcactcacacagacacatacaaatagagaagtaaaaagggaatgattaattttcagcaacacagggtttggggactgcttggaaccagataggtcagaagatttaaatcccctctaaatctcaattcgagatcaatgtttccatccatcctatcatggagagaagatttggtaactaaaatgatagcaccacttaaaaaagtcagtctctggttggacgttatggcctttctctttggaacacagagattctacatttctgagtccaggttcagtgtcctagggttgcacaagtactgttatttcttcatcaaatcatctgctttcattttctgaaatcagaatcaggtccattcaacaattaaatgccccaccacccatggtcaacatatgaacagccctcaatctccaaaaatagtcagggttgtaggtccttaattctgtgatcattgggtgacccccaggatatttcatgggagtgagaacagaatgtttcaaaaagcacttgtgggattgaagacttgattttagcttgaaaacagggaaaggaataatacctgccctcaagccttccaccagcccagagctctgtctctgatttcccagtagggtggcaaatggtcctcccacacaggtaattaatgaggaagccaaggccatgatgagcttggaaagaaatctgttttgttgtttgtgaggaaatgaagggcagaggagcaattttattttggcaaaattcttgagataacaattatattaaaaattgctgcatgagctctgtggggatggattcgtgaaattgtgaatcagaggggctttgtagaggagacaaccactgagagatgtgacacagtgatctctaggctcaatctagtatttctccagttcctgtagggaagtaagaatcatgtgtaagtcagtcatcggtagacccatccatcttggatactacatggccagacatttttaaacaggaaaataatccccatttctccaaatcagttgtaggaaatacattccagtccagctccgttttcataggattcttagcaacgactttgattcagtgttacaatagagcagttcctaagtgtttcagggcagaaaaattagctgtcatatagtgatctcctctgcatagcttggcttctactgagtgaggcttcaaaactacaggaggaaaatatgcatatctagcacccctgatcctctatgccctttgtaaattttcagcaccacagcctatctttgaaataactatttttccccttaggggaaagtggttagattctattgatttcatttttgtgcaccattaatctgtagcatatcctagaatttctagttgaatataaatgtgaccacatgatgaattttggaataatcaatccagtggaaaggcaggctttgtcaacaaagaattatcttctatggagttgtgaacctggagaagttctgtagcgggtgtcttgtttgatagctgctgccctcatttaacaaaaaagcatgcttatgtactcacgtctctagcactcctcttacatgtgttcatcctgaagctgtcacctgctcttctcccctttccctctgaaggaaggaggtttgcacacctacagacttggatattcactttgcaagtcagtgggtttacaagataacaacaaatggatccttagcaaagcaggtggcagggtagtttgcaaagccttatgcctatttcacctagaggtttcttacaggagaaataacagaatactcagtgccatctgacagctcctagtccctcacatttttcacaaggtgtgacacagctgctaaagaaatctcagtttaattgctctatatatgtgtggagtttcctccttaccaggttgtgacactgctcatcaagggctcaagaaagacaaaccgttcttttaaaatatatgaaataaaaattcagatcaattcttagtttaagaagagaaaaatctccaattattcccagcttcttttcaagaaaacaactaaaatctgaccaaattctccttttgaaaacatatcagtgttcttgtttttttttcaactcaccattttttttagggatgttaactcttttcctgcctttgttagggatctccagactgtgcctagaaaagagacaaaatcatgtaaacaggaaggaagacactgcccttcaacctagataactgctggacaaggatggtttcttatgagctagaagagggcactgaatagagctattggttcaactttctgtctccaagctgctactgcaagagcagaaaccaactccttcccacccactgggaacctcccaagagacacaaccttaagaaaagcatttggccctttcagagctcaaggacaccctggggggatagtagggaaagagctaatcgtgagacctcaggccacaagagggaccttagtgtggaagtacatggccttgtctttccaatcagtcaatggggaaaaagaaggtgggaataaaagtgtaagtgtgtgtgtgtgtgtgtgtgtgtgtgtgtgtgtgtgtgtgtgtctgtgtgtgtgtgtgtgtgtgtgtgtgtgtgtgtgtgtgtgtgtgtgtgtgtgtgtgtgtgtgtgtgtttctcaaaacagtttatcaataataaggtattccaaggacagctgactataatggaagccttttagaaaagtgtggcataaattcatccttatttgtttggagatttaggtgcacaagtatacacagattctcaaacatccaacactcagatactgtgcttacaattggtacctctgtacatgactgtgttttttatgcaccagtatgtgtatataaataatgcatgtatttcattcagatgaaatctgtatttacaaaaagaatttttgagaagagtttgtagtttttgttttttgttttttgttttcatttcacgatggttgcaggaacctgcaggtatgggtttggaagtgttttcagatgcatatggtgtttcataggctcacacacctatattctcaagcgttgctagatggggagctatagacacaagattgcagcagagcataagcagggatgtggcacccatgatgaagaatctcagccacttcaggagatggcgcctctctggagctgagaaagaggaagtgcagtcaaaagggctaacttcctcaaatataaagctaaactctattttaaaagaataggaatttacttaaagataagtataaagcccagattgcaaaagtccttacttgtatatctagtataagacccccggaagctcaggcctccagaattttttcccaggattgtggccactccaaccaccagggaggaggcagaaacttgatgcaaatagcaagaggctttaatgaaaggtggacgtttgtacaaacgggctctctcagcatgcagactataaagcagccccgtcccccaggcacaggcgtttttaaaggcaaaaaccataagcttagggaggggtcttgactctctgttcattgaatatgtgaccagagtcatgggttcctaggaagccctttgtcttgaggggaggcctgggaataagatagcctcctgaccccaccagttgtaaaaccttcagacctcaggatgtgctaactaatggtagctatctctttgtttcacagggaccccttaattgttaatgattgacacattggccagtggggcaatctgtttccttcatgagccccttggggagggtggccctctgggaattcttggtacccagttatcttatggcctttaaagggagtaattgctggtggctggtaaattccaggcactaagtcatagtagtagccttggtcagtttctgggctatatttctttgctaatttttaagtctttcactaggagtatctagcagttactcaccctttatttacgaatgtcataacagttttcaaaaggaaaccttgcccactaaagatggggacactctgtccagcatctctcagtggcctttaagctcattgttggttctttggtggtactctatctaactgatctataggagcccagatcaattagtcagtaaatacttgttaagtgtcttctacatgtgagaaattattctgtttcgcatctagccttttcctttaggtttctgccgaaataggtttattacatttgatcgtttgtcaaacaattctgagttagattctcctctacagtcaggtgtagattagaataaaggacatatgataggtaggatttttagttggggggtggtaggggaggaagggagggagaagggaactgggattagcatgtaattcaatcttgtttgtaattcaaatatataaaaaataaaaacaaaacaaaaacacccataagtgaaaagcaatgttgaaatttcatagatttaattaaatttccagtatgacaaaaatgtgatagaggtaaatgaaaatggtgaaatgcaaaagagagcatggctgtcgtgtaaaaccagacaagcaaacatcttaggggcttcgttactcattgtgcagctccgtgatgtaaacagattcctaaactccagatgttacatgcttgcccatgaaaagccatgctcaagttagtatccagttgtttctcctaaatgggctatagaaccaggagcctgatttaaatacacctctacagctttggacaagttactctgtgtcatcttgtgttttattgttaaaatggtgtattagtaacagtgtttacctcaggatcattgtgtatataagatgattagaactggtcttgccagatgaataagtgttcttattagcatttatatcatgtctgacaaataaatgatgtccaaaaatagccaatttaatttctgctgatagatacttaatattttaaataaatgatttttttaagatttttactttttaaaatttatttatgtattttacatcctggtcacagttcccccccccccagtcctttcccgcacccctctctgttactcttccccagttcactcctcctctatttctgtttaggaaaggacaggtatcccttgaatatcaacaaaacatggcatgttaaattgtaataagagtaagcacctcttcatgtattaaggctgaacaaggtgatccagtatgaggagtcgggttccaaacacctgtaaaagagttagagacagcctctgctccctcccactcttaggagtcccacaagaagactaagctacacaagtgtaacatatacacagaaggcctaggtcagtcctgtgcaggctccctggttgtctgttcagtctttgtgagcccctgatcccaggttagttgaatctgtgtgttttcttgtggtgtccttgatccttttggctcctataatcctttctctttctctactgcaggattccccaagttctgcctaatgctttctgagttttcagagtgggtctgagttttattggtttccatcagttgctgaatgaagcctctctaatgacaactgggctaggcatctatgtataagtatagcagaatatcgttagacatcattacattggcatttttttcatctagtcatgtttgcttttgtcctaggtctctgggtcatccagtcagtgggtccttcctggtgctccaggcagtgatgggggcggggcttactctcctggaatgggtttcaggctagactggtcattgattggccactgcctcaatctctaggctaccattacaccagatatcccataggcaggacagactacataggttgaaggtcatgtggcagggttggtttcccactccctccacttgaagccttgcctggtcataggagattttcagttcaggctatgtatctggtattgctaggagtcttagctgggatcatccttatagattcttgggagattgtgccagatgtttacctgacaatgaaatacccatacttttccgatagtctctttaagtactctgcctctcttctcccccacaacctgatcaccaatgtttccatccccacctgatctcagtccactcacaaaatcccttctatttgcccatcctaggaagatttgggcactgcccccctttgagccctccttgttacccagtctctctgggtctgtggattgtagcatagttatcctttacttagagttaatagccatgtataagtgagtacacaccatgtttgtctttcttggtctgggttacctcactcaggaatttttttttagttccatccatttgccttcagatttcctgacgtcactatttttagcaactgagtaatactctattgtgtaaatacataacactttccttatcaattctttggttgagagatatctaagttatttctagattctggctattacaaataaagctgatatgaacacagttgaacaagtgtccttgttgatatgattgagcattctttggatatgtgtccaagggtggtatagttgggttttgtgtcaggtcgattcccagttttctgagaaaccacaatgaattccaaaatggcactcttaccagcaatggaaaagtgttccctttgctctatattctccccagcatgagctgtcacttgtgtttctgattttggccattctaacaggtgtaagacagactctcagagttgttttgatttgcatttcattgatgactgaggatgttgagtatctccttaagtgtttcttgaccatttgagattcttctgttgagacttctctgttcagactgtaccccattttttaaattgaattatttggtttgttgatgtatagtttcttgagttcttaatacattttggaaatcagctgtctcttggatataagatgaagatatagttggtgaagatctcccattctgtgcattgacatttttcctattgaaggtgtcttttgacttatagaaacttcagtttcatgaggtcccatttattaagtattgatcttagtgtctgtgctattggtgtcctgttcaggaagttgtcccctgtgccagtgtcaatgctattctccactcaatgctattccccactttctcttctatcaggttcagtgtatctgaatttatgttgagatctttgatctacttcaacttaagttttgtgcaggatgaaagacagggctctatttgcattcttccacatgccaacatcaatatacttaacatttgaccatgagagttctgggcaactctggaatttctcaaatactgaaatggaacagtagaaatacttttctgactgggcaatttttattaacaggcttctccatcaaggtgtttttacctttgtagccttcatttaaactaatgtacagcctgaagcaccttgatccttaaataagcttctgaatatttagtttaaaaattgtggtggaagatggaacaactaaacctcctaaaatcagttaaacaaacccttggactaataatcttaaaccagtcaggatgtctaagataaaaaatacttatgacaatttatgttggagaggatgtggagtagggggaacactcctccactgctgctgggattgtaaaatggttcaatcactttggaaatcaatatggtggtttctcagaaaaatgggaatcaatctacctcaagacccagcaaaacagtaagaatattctcatcaggtaatggggatgaatatcacatgagaaaagcaatttttatatcagtataaaaattatacagacattatctgtataatgaaagcaaatatatatcaatatcaagaatggaaactgaggtaaaatggccaagggaaaaataatgttttgtgtttgctagtctaacaaagactcatgttatatctttatcctttttaagaagacaaacttcttttgtggccttcggtgcctttgtatttgggcataaatgctaagaattgcaatgtcctcttggtggactttcctttgatgacaatgtagtgtccttccctgtcccttctgattagtttgggtttgaagtctattttgtcagatattaaaattgttttattcttaggccaatttgcttggaatatattttgccatcctttcatccagaggtgatgtctatcattgacactaagctgtatttttttaatgtagccggatgtactgttttctattatctgtttgttttgtcctattctggtatgtttttgttttatcttattaattattatcccttagatgcctctttattccctaatgaaagacaaaaagggagtggatccagatgggagaggaggtggggaggaactgagaggagtagagctaggggagacggtaacaagatatgtggggtaaaacaaaatctgttttcaataacagaaaaaaataatgaagaaaaacctcatttactcactccaatgacatcttgatacaatttcattttctataattggaaatgctaaactttctaatcatcttgttacctttacaaataattacaaggatccctggatcttttctttgcacaaatttcttaaagaaacccaatttcttaatacttggatgagtttagtacaagtacacagttaacaagacaggactatatgttagaaagcataggttggtattaataatgataaaatggtggtaataattatcctttattagtgagtgtttgctgtcaactctgttatagtccagatcttcttagtatctgcagcatagtccaatacacacacacaatcctgtgcttggcatcaagggaacttggaaaaacatataggatagtaagccaaactactcaacacctagtagtaggagattgtcttacattgaaagagaatgaaagcaatcagcaggcaagactgctacgaaaaatcttagctatgataatacaagatctgtacaaagaaggagtgttgtgtccactttaacttgagaccctcaactacataacagccaacattgctaaggaactgatccatgtgttttcggagcttccagactccagtgaaaatgatagaaaaagtgagaagagtagctggatttttcttttctttttctttttaatcttcccagctggaagacatttatggatttgtttcataaacaatgttgtctagcaatatttctcaggtttcaagtcattgcaggtaggcaattaattcttagtattcataaagaaacctatccacagagaatagttttttaatccattgcctagacatacagaatttatttattttccataaaagacacaagaggtggttgctgttattttccttatgaagaagataaactctgagcaaggagtaaagttctttgcttaggattgtaactacagcttcaaactggtgtttgttagttctatggcctggaatcttcactgtaaactccataccatctgtaactctatgacagaaaaagggactgcaacagaaactaagtcacatatagagaagagtttaatgctactttcaactttcataaaaatagatctaattctgctattttatataggtcagattattattattattattattattattttgctgatttcactttatataatagaaaacttgtaaatagttttctttgatgagtgaccatccccacccctacctaaacacacaaagccttgcttagtatatgcaaatatataccgacaatctgtgttctattgggctttgttcaatttcatatttattttattctttcatatgttactgatttgattcaatgtgcagaagtttgagtaaacaaatttaggaagcaaatagttgtgacatagtctataagtagttcaaacagttctctaaagtgagggaatttggtagaatatctacaatttagtgggcaatgctaaggcatcccattcagaacagagatgtattcaccttgtctctggatttcaaatattttcttgtattatattgttttctgttttatcctttgcctaggggtgaaattaaaaatgtttgaccaatattgtggctcaggtaataacaagatggccttgaataaaggttttctaacacattttgcttactatttagtcaatatccactaaacaaattgacttcaaatcctcatgaagttcatgagagaagagaaggacatttagccctcttgatgtgtatgtgactgaatgaataccgacattgcactgtatatcttgacttgcagtgggcttgaaatttgtggaaagtaaggctgtaagagtccataaaatttgtccttaggctatatataatacaaacttttatagtttgtatagaagtaacatttgggaatgtggatctttgaataacctgttgtttcagagttatgcacttaaaataatgaactggattaaagcagggaatagcaaactggtggtaaaataaatattaccaggaagtctaaaattattcatagcagggttatgattcagacatacttgataagactcttcacatgtttttaaggaatctccagtttttaaataaaatgttatttaaaagattttcatacgatatatttttatcatggtttttccctcctccaaatccttcctacttcccaatccatccaacttcaagttctttttctctgtctttctcaaaaaaaaatctcccagacaaaacaaaatcaaaatatcaaacataaaccagtaagaaaaaaaaacaacaaaaacctcaaaatgaaaaaggatggtactaggaatctccatttgaaccctttcatctaaggtaactctcgtatatgtagtccaaacttggtttggagatggatgtacagaatcaataatttattaattttcacatgtattaggaagttcccaaacagtatttaaagtgtttactgtttgacatccaccttccttataagaccattctgtgattgctagtcacatccttagtaagacttcttctcctctctactggcatctgtcatgcatcaatctggaacatccctaggctggtggcaccttcccagtatggtcttcctgaaagcatctttcatctccttgttccttaagcagtagatggctgggttgaggaatggtacaatgacagtatagagcacagagatgaccttgttatagttgaaggtgtacatggctcggggccgtgcataggtgaagagagtggaggagtagtagatgacaaccaccaccagatgggaggtgcaggtggagaaggctttgtggcgtccctgggcagtagggatcttcaggatggctacaatgatggcagcataggaggaaaccacagccaccaaagggagcagaatcatcaccagtgctagcaggaagtctaccagctctgcttgttccttgtctgagcaggtgaggttgagcaggggggaaatatcacagaagaagtgattgatgatattgggcccacagtaggatagtcgtgaaatgaaaagtagcttcatcatggaactgaagaaaccactgccccaagaagcagctgcaaggcgagtggccaggctggcaggcatgagactagggtaacgaaggggctcacagatggctaggtagcggtcataggccataactgccaagaggacacattcagtgcaggctaaagcaataaagaagtagagctgggtcatgcaacctacataggagactctgccatcctgggtaagaaaggctcccaagagtctgggaatagtaacattgatgtaccatagttccaggaaggagagatgaccaaggaagaagtacatgggccgatgaaggcttgaggtgagccagactgtagaaacaatgagtatattttccagcaatgtcaacagataaattgcaaaaaagaagacaaagaggagtagctggaaggatggagaggtaggaaatcccaccaagacaaactcctccacatggcttccactcaaatttctcatagtgtctgtccacttggatgcctgaaaaaataacaagaataagaatgactaaaacacaggtgcatcaaagccagaatattctcaaacagattaggagcctgtcgatgttcagttattcactatactaccaattcttattttatatttcccccttcactttactgttacatttcaagggagaagttctcagacttgaagttgatagttggcaactaatgactgcaactgcatcagatactcactgaatgctagctgagagacttaagaatgggatttggtattttgagtcttggttttcaacattatttaaaatctatgatgtgctcttctctctcattcttcaggaacaactacaaattcccaagcctcagagcaccttttatcaatgtttaatgaaagaaataataaaaggaggacaccagatggaccctcagggcttttcactgaagagaaattgaccaggaggtactgggaacacagtgactgctagagctgcattacaagacagcacagcaggaagaagtattttgaaatgtgctcactgtaaatggagaaacaacccagtgcacagtagaaaattccctaaaaagagcttcactttaaaaataagtctttttgagttcattccttgtgcctgagtcatagtttttcatatctagaactaatgtgacagactgcccatgtcaggcagaatggtaatgtcttccttccagctactcgggaggacaaggcaggaagattgaagtgaagcatccaggactagcttagacaacatagattttatataaaaattgtttggaatctgcatgttatatccacatagccacatgagcacacacacccccatgcacacacatacacctgcacacacctactggaatacagctttggccaagctcattagaaagctgaaacaaaagctttgcctgctttaaaggtttttggctgttctaaaggttttgagagtttgattgaagtaaataatttaaattaataattgccggatggagagacttctgaattaactaggtgcccttacattcaatcacaaaagactttaaaagaaggcaagaaggaaatctgagatctatctatagacaagaagacaacataaagatggatcacagagagatctgaagatatggctggccgtaaagactaaggaataacagcagctaccagaaactagaagagccaataaaagaaattatgtcccagagcttctaaaagaatcacagctctcctagtaccttgacattggaaaatcagtgcagatttccgacttctaacatgaaggactctgagaagtaaatactattctgagtcaccaaatctgagtcaccaataaaatggtagtggccacaggaagctggcactcctacaaggtaagagttctttttgctcgagctgaccattggctgtgcttccctggtctcttatcaaccctgccagagacctgctgtctccaaaaggctgttgggaaagttgcaaatctgaattaagttagcatcatatactcaacatgaatatttccattatcagtaggatttatgcatgtcacatttcttcctcaaataaacctgaaaatgtgatatgccaggttgttaaccattttaattagacacttaaatacttaaaggacctaaatcctactgcagtgggaatactaatttaaaagaaaccactacaccacctcttcatctattcaaagcatctaaatatcaatgctatgttatccattaatacctgttttaaattatgtaaatgaatgtaaatagtaatattaacacctagtatatcacaggaatcacaatccagggtaatatattttttataattgcaattcttttatggattcctctatgtgctttgttgtttgtttctgaactcttaattataggactttataagaaaatttcctctaggtattacataatcagtatacatttagcccaaacactataaatatctttcaaagtttgaaaaattgtattagacacaattttaaaattttggtgaaaattcatattatatgaatgtagatttcatattttgattcttatatgcaaccacaactacaaattatcccaaatgagaaagactcaccaacaattccattcttgcatctcactgtagaactctaactgctgagaaaaattaactcccccaagtgacactgatggctctgagaatgacagtggctttgctatggcaacatctctaaattgtttcagctttttattaagttatatacagaaattacaccataatctatcatcaaaattgtttgtattgatctattagcaaacaactcaatcagctcagacaagtgttgcctccttatctgtccttcattgcttcagtgctgattggccctgacactaatatacacactgggcactttcagatcacaatactcagttctccctttcctaatcaagaagaagaaattgattttgaacaggaaagttggaaggaaaaacagctctttctcaagcagactgattttagggaggtgctcacgaggaagttggatgacaaggaggaacaattccttcagtaatatttcttaccctggtcttgggaaaaaatttgttcccccccaagtgtccattaagcccagtttggaaatcagtgaaataatggattagatgcttttctgagaggggaggtttacaggctctgaaaaagcccaagtgatgagaggtttgccaagaaacatgctttcattgccctgttcccagtgtaacgttgtacactgttccctgtgtacaatcagacactgtatgcactgtgtttaagatgccataagctcccatcaaacatcagtggaatagattttagtcatatatatatatatatatatatatatatatatatatatatatatatatattgggtgttttttctctcttttgtacagtctgcttagcagaaaggctgttggacatagattcctaactgcaggatttggtttgcttcagtctgtctgggctccatgggtgatgacctcacctttagctgtgctttttctatttttaatctgttgctctcacttttgggaatcccttatttcttcctactagcactccaaaactttcatgacatcagggctgcaccctgctgtcaggacatgacagaacagatgagcctgatattttaactgacatgatgacaaaattaattaattagaaattaatagtggtgtgtgttcgtgtgtgtgtgtgtgtgtgtgtgtgtgtgtgtgtgtgtgtgttgaataccctcccccagtacatacacttgttgaatataattttcccacagagtgaaacaacgtattgttttataatagctttgtgatacgtaggtatatggacctggaaataagaaaaattgcctctttacatcagaaaacctgcctaagtttgcatccagccccaacctcctgtatgctacatatataaaaatttaacagccccattttgggcctcacaggatgtcactgtataggaagtaatagggccttcctctgcagacacaatacctgagccctccacacagaaacactgtttgcagggaaatctaagattacttgattttcaatttttcttcagttcttcttttgatagacacaaagtgaacatcaacactctagcaaatgatatagcgatccatccctgaggaccactgaagtcactggcatgtaaggaagacacaccagtggaacttagtagcctgtttcagtctctgaatacttgttgagtgctggcaatacaacagcacaatgagctgaagtgcctttatctccatttacagataatacaaaaaaatgaatattttattttaaagattttatgtctgggacactgtgcctggttggggcccataaagatgggtccgcttcatcttgcctcaaggtcagagagttcaaaactgtccttagtaagtctaaagacctaaaggtctaaggccttgctacttcaggatgtttcagccttggtaatggatgtctaaataatgatagacttggcctcaggtgtgttcactcttgaccctgaaggccggataacaggtgtggctaccaactgcctgaaggattaagggaagtaagtctgtttgctccttatacatgataatagaagtcttctgccatgtcccccctttttggttgagtatttaagaatgctaaagaataaattagaggcattcagtattcactggattgccctcctgactctatcctgtgtctccgtctttctcttaacatctttacctaccctttctcaacccacactcctcttctcaggtatgaaccaggcaagttgactggctcagactgtaacaccacaaagacagcttcccacagtggatctggtataaacacaaataattctgctgtgggagaaaacttcacttttatcttgtagatcctccaggtaaatgagacaaaaaagttttgacaactgaatggcagattttatcaacatgcatttaaaaatctcattcaatttcttcttcatatatagacatagtaagtatggttttaggcccaagactactttctcttaagcataaaatgtcagttcctacctctcatcactgttcttttcttttaagtgttttcttaaaatttctgccccattcaatctttacagactccagacttttgctgcattattacttagtatatctgtatgaattacaaatgaaatcatagtaaggtatcatgtgagcacagttagaatggctattattgagacagagaaaaagagcagatgctggcaatgatgtggaagaaataaatctctctgtggttgttgggaaagaaaaatagtatagccactgtggtggacagtatagaggtctttatggcaataaaactagattcatcatgcattcaagtatctgacttgtgtggggatattcaaaaggaaataaagtcagcactagaacgacatacttgcatactctttgtttcttgcagaattactcacaatatttgtgatgtgtaatcagtccttttgtccttcacgacaggactgtagggcctcaggaaatggttctctgagtaaagtgcttgtggtgcaagtagaagaacctcagttcaaatctctaggatccatgtagagctgggagagcatcgtgcttctgaaatctcagtggtgtgtcttcagagagataactgtagagaagggacaccccacaagctcatgagtgacctagtttggtgttttcagcagtgagaaacaaataaactatctcaaacaaggcaaaaggtgaggaccaacaccatagaggaggttttctttggcacacatgcacccatagtcacacatacaagcatacacacacacaacacacacacatatatattaaaaaagagatagctggttgacaaaatttgattatatatacacaaaattgtgtattattaaattatgtaaaagggggaaacttccagttcaggaaaatggaagaaattagctggcatggaaagacaaaccctgaacatgatcctttgtacatggaagctaaaaatgctgacctcaaagtagaaaagaatggaatagattttgctagagatgagacagcacagggcagaagtggctggatggagagggtctggatgagtacctaacagtttcatagaagcaccgccatctaatgttctatgaaacagtgggccgactgtcgtttacaacaacctattgcttatttaatgaaaaactacagaaaggagttcaaagtctccaaacacaaaggaatgataaggaaatgttaactctccctctttaatcagtcattacacattgtatatgtgtgttaaatatcaccccatatttcatagtatatcatcattatatcgttacaaataaaataaatgaaggcatttctatgcctgggaatatacttaagccagggaacattttaatatatgtgctgccgaagtgagcacgccagtgaacattgtaaaaacatttattgtttaccatttccactgtggcaaaaacatgggtctcaggaatcatagcagggcactcactccgacttaagcagatttgaggactgcaaggaatgatgaagggcctgcataacaacacatttgctttgagatgctcaccaggtcctttagcttcccgttccacagtcactttcttcccatcttttggtatttgctaggtctgcttgcctgttgcttctgggcccccatggtctatcacaggcccccttcagtagacctgaggcttcatgatggaattagagttatctgtggcaggacagggcaaagctggagcagtttgggccccaaagccaacagaggcgatagtagccggctcttatcagctgaacatatcccctcaccagggacatgtccccgtaagacatattgtcatggtgacccgtatttctccaacaagactgtccaagtctcacacctcagggagaactcttttcctagggaacatgtgataatgtaacacagaactgcagagaagtaaggtgcaaccttcaaagtgttgcttctcaaactctgatgtcagaggggcctgagaggcaaacagatgaaaactccagactgaaattccattgaggaaaggaaataaagaagtcagagagctgtgggtgaatgatctcacaaactctatttgggttttaaggagatgatcatttgtcaaactagtccatctttgcaccttaccgttttttctgcccattgattggagatacaagctttttttctcccccttccatacttacaagcttcatgagggaaatgtcctttctgtgtttgtatttcctccagacctgtttctagataaaactgggctagcaaggtacataatgtggacctcagaacacctggagagagggtggttgaggagtaattgcagacggctgatgctgggcttggagggaggcagtttaagaatgtgatgaattctgtctcccacaactctggatttcctgactactggttacatgggcaggtggcttcttggttttggtttgttgtttgtttgtttttgttttttgttttttgtttttttggtctgctgaagtcacagatgaaataggttacctcttgaaattcatgctaaaagtacaaattgtttatcatgccatggtaataatgagttgtaataaacacttgctctcgctcttctctgcagtgatgaaatcttcctgttgactatacaacagtagagatgctaactctctcatatatggtataaggcgccttcatcccatctatgataaggaagctgaaaaattcttatcattaagtgaagcaagcagtattattattcaggagtttattatgatgctggtgtaaatgatcctaatgcattgctagtttcataaaatgctagtacataaattgtgtgcattgcctactccataatgacagtaaatgactactggcttatttacttcagcataactctagagtgtatttcttttatatatttttaaagctaataatgataataaacagctatggcagtggagtttgtgtggcttttatattgtactttttgtcaattttattttcagtgctggagattgaacctggggtctgagacatatgaagcttgtattataccaccaagctgcaccccagacattattattttagaattttctgatacttgtgcataaagaagatttttatataaataatatgcacattgcatctacagcagcctcatatattatatcgtaaatataactcgcatttatgatgtcttttgattgatgtataccgtctaggcctgtacaaatgctcaaacttacctaatgaaatgtttatcagaatatgcggccctagttaagctatatactactacatactttttgacagattaaatgggactataaggaaccaaagctttaaggctatgtctgaggctttagcccaggggttttcaactttcttaatgctgtgacccaacacagttcctcatgttgtggtgacccccaaccataaaattatttttgttgctacttcatagctgtaattttgctactgttatgaactttagtgcaaatacctgtgctttctgatggtcttagatgacccctgtgaaaaggtcatctgatcctcaaaagggtcatgacccacagcttgagaaatgtgaaaagatgatatgtctcagaaagacacaggtaaagcacacgagaagaatcagtactgacatatgggtgcaaagaatttgatacacaccatctttgcctagaaatgtgacttgggtctcagatttaataatgtaaatgctaatcctttcataaatatagaggatcacatttgatatgattaacagaggaacagagtcaatgacagagaacgatagggagatgaagaggacagagggaagagggataatgagccagcaaaggatgaacaagaaacctctgaaaaagctactttggctgacaaaaggatgattaaaagattggaagttatccaagagaggaatcacaagactcagaaagggaccagagtccagtgcgctggagataagggacaagatgtttaaagaggtgggtatgtgtgcaaaagggagaaagtgctttcagtaatggagcaggtagaacgactttaagcttcttcctggaggtgcaaaaacacacaaatctatttactggacacatatgatgccactctatgattcccaccccaggatttggcccagaatttccatatatacctgggtatacatcctagagcctggaggctgaaaagatggctcagcggttaagagcactgcctgcccttccaaaggtccggagttcaattcccagcaaccacatggtggctcacaaccctctgtaatgagatttggtgccctcttctggcctgcaggcatacacgcaggcagaacactgtacacataattaataaataaatctttaaaaaaacatacgtagatcccatatataatgatgatgtattgatcggccatagagctctcctcactttcctgtatgattaaaatcatctaagattatttgtaattcttgacacaatgtaagcaatatacagccattcatctagattgtttttaatttggatttcaaggtattgattgctatatgtattattttactgccttttcctgagattttctttttaaatttaaattacctttattttttcaacttttttttttattttatttgattacatgggtattttgcctttgtgagtgtttatgtgtgttcctggtacaaaaggaggccaaaaaaataaataaatctttgcaacacaatgtatctacaatctgaaatgacaaggcaataggcaatagcttaagcaagatagatttttatttctttttacataacttcagtggtcagcggctcactgttagccatgctgccccaactttaggagggtgatggtcactacataaagcaaactgggtatttgcataactgtttggaagctataacattgaaggatccctatattttgtcccaagcgaggaacttgtggctactgtacaaggcggctagctaggaacatacgtgaaaacaggagagatatcgcatggaaagacaggaaataggaaactagaaagaggctaataatgctattggtatagcaactcaaattaatggaactattgcattccaataggacatgactgatgagataatgcatccatccattcatgggagtagaacctccatgactaaattaacttttactaggatccaccttttcaagaccctctgtatcaactctgacatattgaaaaagttaataaacttatatagcatagacctattggtctaagtcatgtccaaacaatcagagactgtttcatcagggcatttaatattgtcctttttattttagatttacattttcatatatagtcaccccttaaaaccagtcaatagaagacagaaaatgtatatctatatttgtgttttgaatattcatagttacctttatctataataccttttatgtaagttttgaatgatattttatttattgaaaatttcatatatatatatatatatatatacatatattatattgtacatagatcatataaccgcctaattactttctcccatgtcctctgggacctcctaacacgtctctccaccaaacatcatgccttctttcattttttaatcaagttcaattagtgttgcccactatacatgggtaggaggctatccaacaggacttgagcaagctaccagtggtgaaactcccaggggaatgtgactcttcctttctcagtagccaacaaccaacaataacttcttagtgagaggtgaggctctggaagtcacagccccgtctgtgctggaattttgattggcttggtcttacgcaagccttctgatcttatgctgataatccaagctgctgcaatttcatgggtgcaatatccacaccacatccagaagacagcatttcacagcatttcttccaatcctagctctcaagttagttctgcttacttttctgcaatgtacttttctgccttggatcagcaaagttgttacaatgacccatttaaactaaatgaataaagccattcagtagtttgttttgtttttccatttattgcaacattttttctcacataatagattctgattaaatggtttcccctccctctactcttcccaactcctctccaccttccttcccatccagacccactctactgtctctcattagaaaataaacagtcttctaagggataataataaaattgaaatataatgagataaagcaaaactaacatgcagaattggacaaaacaagtaaacagaaagaaaagagcccaagggagggcacaagaaacagagacacacattcatatctaaaactccaaaaaaaaaaaaaaaagaaaatactaagtggaagctataatatacatgccaaggaccaggtgcagatccatgcaggtaactgtgcatgcttcctcagtctctgcaagttcatagaagttttggtcatgttactttttgtttacttgatgtcctctgacctctcttgcttttacattctttctgcctcctcattagcaggactccctgaaccctgaggggaggggtttgatggagacctcccttttggagctgagtgttccaaggtgtctcactctttgcataatgtctggctgtgggtctctgtatttgttcccatctgctgcaggaggaagcttccctgatagcaacaaaggcacaggtctgtcagtatagcagaatctcactaggagtcatcttattgctaactttatttattcattttttggaatagtagtaatgattttaccataggttcctggctatgtggtttcaggctcatagtccctcaagtagtgtttgggttccaaatgagatactggcttgttactcccagaaactctgtgctgctgaaagaccccgaagaggcactttcgtagagggagactcacacccaggaatcagcgaggccacgaactggatgtaaaaaacaagaggttttattggagacgcaggtacccggggcgacttagcttttctgaggccaagcgccccgagccaagggaaaggggtccttatatagggaaaaaggcgcaagctaggagcagggattctatttgatggttcaaatgaggcacagagccattccagatcagcatattctcaaggtctggtgtctggtacaacagacttgattcctccctccgcgcccaggtggctgaccttgggggcggagaccttgggacggagtgtttctcaacgggggggggcgtgggggcgaggggtgccctttccctgctcggccccagccccggggcgcggtgccagggcagccccgcctgggtgaaccggcttgggagggaaaacggcagccgggggaagtggaggccggcgggggcagggacagcaggatgaaggtgaagcagggcagctctgcggcagctagcagctcccggacaattatcgccccgcgctgcactctccagcccatcccggctgctccagagagaacacccagcatcagcataggcggggggagacagagaggcagcgggcctttcattcccccatttctcttgtgactgaatgaaatctttcattcaaaggtctctggttaggtctttctctaagcttggccatgctgtctctaactattcctgtatggtctgtaaaaatgataaatctaaccctcgtctgttctgcaggaccacctcagagagtgatgttaaggatttttcgagtgcactgactgactcttctaggacctggatatccgtgtgcatggcttgttgtagaagcttaaaatgattaattccctgtaaggcaatggttccggtccctatgccggctgctatgccccccactgttatccctcctaataatagggccacggtaaaggatattgcctccctcttatgtcgggttgacttctctagtaccctataaatatattcaggttggtgatatgtgaccctgggccaaagttctgtcaatatacaaaagtcaatagtggcattgagaacggtagtagagacgcagggggtcaaaccagtactgcctatgcatagcccctttcctgagacctcagacaatgtgagcttgtgctgcatggcagtttcacaactggtaggcgctgaggtctggtgacgccggacccagacagtgtccccgatctggtaggaatggggaatggtaggatggtccctctggtctttataagttttttttttttaaaggtgtgagcccatatggcctaggggtatgctagggggagtaggaggacccagtctctagtgtccccatcagggagtgataggtactggcatcccctcgcaaggaagttccctttgacttagcatttcaaccagggagaatggacggcgaaattcttttccaaactgcttcctgctgactttgggacgaagttaaggaccccagaaggttgaaatgctagtcaaaaacaaaaaggaatttaggcaacggggaatccatcaggggcttctggttagcagacactgttgcagagatagggggtgtccatatcagcagactagttcacatccatagcaagtctagggttcgcagtctacttagaacagtctgaagtcagcaactggtactcagatgtctgtcagaagcagaaacctgtttaagacatatttaaactaggaacagaggttaaaacttatttatagaagcccacagtgcagaaaaagcagatatctggatatctgttcaaacagcaagaacacatttataactttgagtcctagcaaaaactacagatttgggctataagcatgtacatttttcttctgtccagagagctaggtatggattggacagaggtgcctttggcctgatgaaaagccctttaagtttgtacttagatgacaaccaaaataaacttaaaaaccttgagcttgtgcctgaacagtagatagtcattattttatcagctaacatactgactagtctatagtggatctgactgtctgatgctgtcaagctgacaaccagtaatatttcagagatctgagaagggtatattttatccgaatctactaaaaagtgacagaagccagttagaagtaggtccatatacagttagccaaacccaagtttctccattaccgttggaggcagctgtctcaaagaacaacaatcttcgccaggcctatctgtgagaggttttattttctctctgtggaagagggacatggaaaagactgaccttgttttgtctaggcaaaggggtacaatcaattttccagcgtccagcagctttgtccacagtctcggccaggttctggcaggcggcaggtttcatatctgagcatctgctcattggtccaggtgcaggaactgaggtgcctgtaatcttcgggtcattgtcaggatctggcagtctgtctgacattataaactttaaagataacaatttaaatgccatattctgaagatctctgaagcattagaggtctgtttgtctgttttaattacttgccttaagcacacattaagtatacaggtggctaggtaaggtcttatttctgtaaataatttttagtctgactgtaactggttttaacttagtaagatgtttgaaacagcacagctgaacttaaaactgcatagagctaccttatattccttaaacagtagcttaacttctttcttaggcagggtttttctgtgactttggagcctgtcctggaattcgatctgccggaccagacaggccttgaactcataaagatccatctgcctcttactcccgagtggtgggattaaaggcgtgtatccccaatgttctaaacttaaggcgtgtgctaccaacatcctgagcttaaaggtgtgtgttatcaacatcctaaatttatttctaaaatataaactgtaataccttataatagatcagcatctttcataaaacaaaaactttacattgtcaggctttgctcaaaaataattttaaattgaagctctttaagtacaaacattaataaaaacaaacataaaaaaactggttttaaaaagaaatttaaattcccttaaggtctttctgtaatatatagaagcattaacattgtaaatctcaattgaaaaacttgtttctaagatggtacctctaatttccatgcggtcatctttagtcaagatggcggtttaagtattccttttttaattttagcaaaatggcgaccagtcaagtcatatgaacattttaaaacaagtatatataaaacagaattagcttaatatggttaaaattttagacatgagaaaccatagcacagtttacatttttctctgacttataataaccttttttctgatttttaacaactttcctctgaccttttataacttgctttgaccctccataactttctgtaacaatcttctctgctatgacttgcttgctttaattttctataaccttttagttcatttctctgactctcttagacattcttagacaagtttccttttttttctttccctctttattatttaagtctcctacattttttttttcatttctcagttaacatcaaaattttatcaaagtcctttttacagttcttaataactttaaggccgtttagatgtccggatcaggccagataagtttatacgctcgagctgaggaacaaagagtaattcatttgcgtttatgcacatcaattataaaacaaaggccaaacaacacagaacacagaacaggttttcgcagcgcggtttcgacagagagtcgaaagaattgggggggcgggttgaagaagggggccctccttcttcgtcccaagtaaagattgcacatccctcaagtcgagggccttctccaaagagactgggaaaatgtccagtcatagatctaagttcaaagtacaaattcctcacgctgagggcttcccaagttcaaaatacaaatccctcacacagagggcttcaaacgctaccaggacgtctcctggagccgcggtcgggagttcgaacccgtcagtccctcctcggatccgcctacaaatgtacacagctgtatactacaaacgcaagcgcaattcacaagacagactcagaccagacaagacaaaacagcggatccgcacaacacttacctcccagacgtgggtcggtggtccctgggcgggtctcgatcccggaccgagcccccaaatgaaagaccccgaagaggcactttcgtagagggagactcacacccaggaatcagcgaggccacgaactggatgtaaaaaacaagaggctttattggagacgcgggtacccggggcgacttagcttttctgaggccaagcgccccgagccaagggaaaggggtccttatatagggaaaaaggcgcaagctaggagcagggattctatttgatggttcaaatgaggcacagagccattccagatcagcatattctcaaggtctggtgtctggtacaacagacttgattcctccctccgcgcccaggtggctgaccttgggggcggagaccttgggacggagtgtttctcaacgggggggggcgtgggggcgaggggtgccctttccctgctcggccccagccccggggcgcggtgccagggcagccccgcctgggtgaaccggcttgggagggaaaacggcagccgggggaagtggaggccggcgggggcagggacagcaggatgaaggtgaagcagggcagctctgcggcagctagcagctcccggacaattatcgccccgcgctgcactctccagcccatcccggctgctccagagagaacacccagcatcagcataggcggggggggagacagagaggcagcgggcctttcactgccaccacacaagcatgtcttgcaggagctactcattgtagatcaaagggtttgtggctgggttggtgtttacatttcccctttggtagcgtgcagaatactttcctataccaaagatggcagcacacaggaatgacagctctgtgtagacacctgtctgacatctccatgttcaacgagttgtgtaagtattgcctttggcaatgggtcttgccggcagtttgtgaagagtaaagagtaatctatagtcttggcaacaatgtcgattgtttggggattcccacaggaaccctttgagctggttgctttaaggaattcattcattttctctttaaggacttctatcatactcataaagactattttagagtctttgtcttgtgcttcagctgtgttgaaatactcgggacttgttgtggtagagttgctaagacctagtggagacatcttgtcttgactgtattttaatgctggcatgtaggcattgggttttggaagattataattctaagtgctgatatctgctcttatctttttgagtgggttttataaattggtttctggtgctcttttgattcttaatcgagtgtggtggctgtgtcttgcctggtaggaagttcttctgggatcctgataggtgaaaccactggggggtcccagacaaaatgtgtttctgggtattgggagctgatgctaggggtggggatggcctgaggagggttaagggggtccacaggagcaaagaaatcacggtgttacaccagtatatagttagtcacctggaaatgggggcagagagtgaaaagaggccaaagcagatggtctactaaggagctgggcatgagactaggggacaggacttggaggacagagggatatttgtagttagcttacctgcttcactggccagaatggcctgtggtttcccagggcataccagttgcagtcaatggacaagataaagcaatgcttggggcaaggcaagtttgcagggaatccatgtgatccgctggagaaggaagcaggggatttgaagggaggctatagtagatggtctctcacagagctggggataatactgggaattgtgccatgtgagctaagggagaggtgaagatcttcagttagcctaactgagtccctggctggagtccaagtttcagaagtttgataaattgtgaatcttaaactactattcactgccaaaagcaacttctttaattaaggttgagagcctgtctattgatgggcataaacatgcatattagagggtagtttgacagcatgggcatttagccaaacaacagcacataccttcaccttccaactcctaggacccccctccttaaagaaatattttaaccatatttacagcagtagaaatcaagtccctcctttgtagcaagtctctaatgcaatgcgatcagatagtgcttggttgctctacagttatcatgcagcataatgcaccagtgggcacatcttgcctcttagttcagttttatagcatgtaaagttttctttatttgctaaatttttccaggctctagaaaactctgacacatgttcacagagtccttttcagtttccacacacacagtagtaaatgtataacttttgcttttttacataaaattttacttaaagtagaatcctctcgtttcaattctagatttaaatataacctcatctacccacatcatgagtgagtaaatactatttgtttcatgtcacatgtcttccttcaattgaaaaaaacatagttgcaggactggagacaaattaaaataacataacttacacttcagtttttcagcagatcgagggcaacagaaacagtggctgcggatgtgctctaaacatgagtccatgcaaagtgagagggtcaccatggcaaggagtaacctcaatgacctgctatgcttgaccattttcattcattatctcatttgtctttttaaaatgtcatatgtgtaccacatcctcataaaaaacttaggttttttttttttatagacatcacagtcagttaactgaaaaactgaataaagctttctaggaattttctagatttttgtgactgaattgttaataagatctctcattattcttctgttacataatttgcatagtatttattttttattcttgactagctttacctagtaataaagttttatacattgtttaccttgttgatattattaaaaatgttttctggggcatcaaatatctaaatatgatagcaatttcatttgaatgtcctagcaacagagaataaaaatatacatttttatatagaacatttcaaagtcatagaacagccaggtattggtatattatttattcacatgaaatgtgttgaaagagttctcctatacttagaaacttagaagttattatttagaagttgtgatgccagtcacaaatagggcactattaaagtatttattaatcaacctgtcaccactatggtgtgactactcaacaattgggtttgtatatttgagaatgtgtacgtacatatgcatacccatgtttgtgcaaatagccagttgttgagttctacaacatatatttcctaccaggaatagcttttctattggaaagtctaacctcatgcattacaatttgtaccaggaaaaattaaaacttaatcattagataacgaagacttctgtctgtgaagtggtcatattcctgcttatcacattgccctatttcttttcttgcttatgaatgacacaggagacccagaaatcgattggcagaatcctcagatcagcagggctagggataacttcttgaacaagactagaaaatagctgggaaagcttagaagaaagtcccaatcacttgttcctatatctaagccattctatagaggtcacagagctaatgatccatgggctaacgaggaaccacatattaacagtgatataatattattttttcaatactattgtctttctcatgacctttctaaaagctgccttcatatccttattcctgaggctgaatatgatgggactgaggaaaggagtaataacggtataaggaactgctatgagcgtgtcatctcccccagaagcttctggcttcagataaacaatagatgcaaacccaaagtggatgatgaccacagtgaggtgtgaggcacaggtggaaaatgctttttgcttaccctcagctgaagggatcttgaggacagaagaaaggatgaacacataagtcaaggagatgagcaagaatgtacccaacaaacctgacactgacatgagtgttacaatgaattccgtgaggtcactgtctatacaggacagcctcacaacggccctcatatggcaaaagaagtgtctgatgaggttgggtatacagaaagacaccctgaatatcagtgcagtctcaattagagaaatcaagaagcctccagcccaagcagaagctacaagttgtccacatgcaacattggtcataaggagagggtatctgagcgggttgcagatggccaggaagcggtcataccccatcaaggtgagaatgatgcagtttgttccaccaaggcccaggaagaagcacatctgcaggccgcagcctgcgactgaaatgtgtctgtcgttgttcagcagatccaccagcatcctggggatgatagtcagggtgtagcaggtctcagagaaggagagtgcactgaggaagaggtacataggggtgtggagagacctgtccacccatgtcaatcccatgatggtcaggttgcctgcaagagtgagaatatagaggcaaaagaaaaccccaaagaggaaggtctgtacatgtgggtaagcagagaagcctatgagaatgaattccttcagggttgtttggttgatcgccattgcttctgttcctgaaatgtgagagagaaacagacaaaccttcagtccttcttattctttaatattttcaagtgaaatgcatggtgttgataagagaaatcatcagacttacaacagccaatcaattttccgttcagtttagtaatactcagccatgcatgtagatgatgtgatttcataattatgcattcatttatgtcttcaacagtatcttaattatgatgtactatgccactagaaagtttatttcttctggccttgaagaaagttgactatcaattaaaaaatctaatgctatatatgggtgacctctcttgaattgtttgttcctaggatcccatagatcaccaaaacatttaagggtactgccattgctcttggtgaacatccagaaacttgtggtatgaccctattgctaaagacaccacataattaagtcatatgatttagggaaatcaaggtaatacttatctggaacattcattcatgttaaccaagtcttagagtgctaaaaacttctatttaccaagccagggaagaaagccataaattcttgggaacacaataatggctggccttgaagatatacccactgttgtaatagtgcatcaaggttgtggagtaaccagttactctctaattggatttaaatcctgcttcacaagatgaaacttatgcctggtaccattacctggacccaaaaccattgacaggacaaattatagacaataagggagaatctacctctactattctggcacatgagaatagtaatggactactccttaagtccttgtctcatagattagtgcatctctcaactccaagagaagcttcttattgtcacagatggtggttaatacaaagactggtcaatatacaaagagttagagtctgtggcatgcttagctctatttgggatatctatgtcacactgtttccctagaggactcaggggtcactgaagaagagtgaggtataatattttaagagttgtaggttgtagatgtgtataacaaaaaagtattttctagacatgcctcatagtgactgtgactgcaagacaaggttgtcaaccaaaaatcccagtatggacaggggcatgctcacaaagtcccttctttagctgagaagctaatgccaattgatagctgttggaaggggaaagtagtgacggatgacagggtgtttgatcaaaatatcatatgtacatgtgtatggatattctctaacaataaatattactaaaagtaaagaaaaaatgtttggaatacataaatgaaaataaaactaaagtaaatttacctcaaaagagatttttactggctggtcctggaataaagatgagatgatgagaagaaggcagatgatggtcagaagaaagagaataggacacattaatggatccacctttggataagactctcaacattaaactatgctgagtgagtatggggcctggggaaatagctctggataaggcatttgcctcagagatatgaacactgagcttaggttccagcacccacgtgaaggttgtacaggcattgctggctggctgctatcccagtactcaggagtcagatacagggatcatgaggacaattgtctagtgggaccacatggaattggtgagctcttgatccaacagatatcattttccaataaacatagaagaatggatgaagacagtgtcaactttggatctccacatggatgcacacacatgtgcccacagatatgtcaacatacaacacacatacatgcaacacacaacatactaaaacatgcacacatacaacaaacataccacacacacatacagcatgcaacccaccacacacatatacatataacatgcaacatatcacatacatgggcacatgtaacacacaatataccacacacacacaaacacactcatcacatcatacacattgaagcaaaaaaccccacaatataccacatacttgtataattacaacacccaacatactacacacatgtacacatgtcaaccaaattgttgagtaaatgaaaacatgctcagtgattgtcttagatttttcttgctttgataaaaaccatgacctagaagcaacacaaatggaaatatttatctcattttacagcttagggtgtcatgaaggaaatgcagaaaaggaagtcaaggcaggaatcaaagatgagatcaaggaggagtgaaggttacaggcttgtttcctatggcttgatcatcctgctttcttatgccatccaccacaagctgccaaagggtgccaccacacccagtgaggtgggtgttccaacattaaccaagaaaatgtctaatagacttacctacagagcagttttagggagacttttttttcaattaagattttttccatatacatgtagatttatgtcaagttaataaaaacaccaaaataggcagaagtaatctaacatagccattcctacataattcataatcctatgtctgttaaggaaatattgaaacaatttcctggtaattttagaacaaagcttggataatgatttaaaattgttagagaaacatgaaagcatcattactttttgaggatggcaaccagacactaaaacatcagaagaaattaaaatgaaacacactttccttttgatgctttgaggagagagaatggtgggcattaggacaccacaggattgttaggactcatataattagctagaggtgtaagactaattgataaagaccctaaatgtaaacttgaaacaggaggcaactgagattatgcccattttcttaatgacaagctgtgcccaaagacaaatgttgtgaagtcactgtgtggattattcagtaactcttcacccatttattctcatttcccaatttccacaacatgatgtctggctacataattaaggtatccagcttcacattaggtagagatatttttcctgtctcacatgtcaacatacttgataactagcgtttatggagtctatatttccccaaattctttcaaatgtttactgatttcttacttcactgaataaatatgaagtgcatatgacagcttgatctgtgtaggacagctgagattatcttacattggaaacagttatatctgggaagtggcatgtttttaactggaaccacactgttttgtccccattctttccactccctggcatttttctttcaagaatgtgaccatgatcattctttctgtatttctcaaggtgacactttaataagacaccaattcccgatacgtgctttatgaataagttaagaatcgggaaatgactaatctagaaactgtctggtttactttttcagcactgggtgttttgaacagtagaatgacagaatttccatattgcttaggtttagttcagcctagattaagcttcctatggcagagtctgtcatgctattgtcagaaggggcatagaaaaataatggagacatataaactattccagagataatgtatgactccgtggactcgatcttatagggcttctttgattcctctgtcctcttagacctgcttagagcgttattatttcccagccatgcatgaacaacatgctctaatttttcttcttttgtatttccagttttctttagtcatattgtcttattatatcttattatatgtgagtaatcgtttctcagttctcttctgaggctattatattggggattgtattttaggaaaccctgggcttctttgttagtcattttgtgtaaacctccttaatgtcgaattcactatgattcttcctgatttcaaaatttgcttgatggtgattgttccagtccccaatgattagttttctgtaatattctgagctttcaccccaatcccccaagaaaaattatgtcctactagggccattttgtttcccctaatacaaggaaacacatttctcccaccaatagaacatctaacacatcaaatgtcttaaactttcactttatagcaactctataactaagtcaattctaagtatttgaagccaaaagggttaaattattgtatcaaagatataacagaacacattaacagaacaagaacctgatttagtttcttgtgtatttagaacaaacccatgtgatttctttataacacacaatgtacaagtaaatgttggatttcatacaacacatatgattccattccaacacaatcagaggatgggtgttgcttgcaaagtcaccactaattttagaagaattttgagatgagaagccaggcatggtagtgtgtgctttaacaatagaacacaggaaaccaatccaggagggttgcatgagttcaatgccagtctgggctacacaatgattcccaggataggatggctagaaagcactacagtgtgaaatcctgtgtttcttttgttactgtaacttaatagatttctcagtgcttgtgagcatttgctcttattccaagggaccagagttctgtttctatcatccatgtcatgcagttcacaaatgcctgtaaattcttgtttcagaggatctgattcttaccattgacttcctcagggcaagccacatgccaatggaatgaacacacacacacacacacacacacacacacacacacacacacacacacacaagcattttgaaatattttgcaatgtaaggaatgactaatgtatatgtcaaaagggttctttccttatctggtcattacctaactatgtgctagacttttactggataaatcatcaaaagcattgtatggtttccagattttctctctactataggcatagcctgaattaggatgtggttattggatcccacctcagcttcatcttactccaatcagcctgcacctattttaatttgtgttaccaatctttagacaaaagaaaaatggttttccagcttcaaagaggaatgatgaatgagtgatgacaattcattattaataaaagagagtcataggatgtgagtagtttcctaccttgttacttcattaggttacaaagcaagtcactgccactggtaaattctcaacaacattcttcatggttttgtagaagcatgcattgttcttcatgcaaaagaaataagaactgagttataacaatcactagtctaagggtctggattctcacttctattgatgtgtgtttggtaaccttaagaaaagttgctattccctttgtgtttgaatatctgcagttggcaaggatggagttttctgagtttgtgcagctttcctctttctgtggctctagagttgtgtgatatgagggttaagtgaataagtcacctctgtgcatctctcaccacccactaagtgaccttaggtggagccttgctttctgccactgtgagttgtgataattatcaaaggccagggctccccaactcttgaggtttgcatgggtctggttaggagtgccccagagatccctgttgtctttcatcagagaaggaagaaaactttcctcctcaactttataatttgctctcattagttatagggctttgagtaacatgcaacctttaaaacacttctgcaaatccttggggggtttaaggtgtgcagaattcatcatgcatattaaaaaactttctgctgcttgtaaattttgttttggcaggaagcctaagtgagagttagaacactaagactaattgagagttcacattcattgacaaaaatgtttccttgaaccaaactttatggcaagactttaaaaacacttataaaattaaatccttgaaaggacattcagcattatcattcactagttaaatgaaaatttcacaatgtgactctaataaatgactatgtttatcgctaaggtaaataaaattatatgtacacacttagtcattggtttatccattgaaggctatctaggttgttttcatttcttgcaattgtgaatagagcagcaatgaacatggctgagctctctctgttgcaggatgttaagtcctttgagtataggccgaagaatgatataacgtagtcataaggtagatctattcttagctttttcagtattcatacggattgccataggaactgcaccagtttagtgccagaaacagtgaatgagggttacccttgcctacagcctcatcagcacttgtcagttgttttcttgatcttaggcattctaactagagtaagaggaaatctctaagtaattttggctcaagtttccctgggtgccaaggatgttgagtacattaaaacaaatatcttagccatttttattccttactttgagaataatctccctggttagtagtgcacttgcgcgcgcgcgcgcgcgcgcgcgcgcacacacacacacacacacacacacacacacacacacacacacacacacccctttaattgaatcatatgctttcttgattctttgtattttgaattctttatatattctggatacgaatcctctattggatgtatagctggcaaagattatcttctactctgtgtattttctcttcactgaatagatttgtttccttcactgtgcagtaggtttgaggttccagttgtcaaatgctggctttatttcctgagttaattcagccctatttataaagtcactttccactgctatattttgtagggtatcttgcctgtgttttcttctataagtttcagtgtttgaaatttcactttgagcttttggattcattaattaattcattggaattaacttttttgtggggtgatatgtatggatctattttcatcctcctgcatgtatacagtcagctcccttcagcactattcttttggtcaggattgctgacgctatcccaggacttttgttcttccataagaatttagatcccccattctttgaataatgtcacatataatttgattaggattgcattgaatctgtaaattgttttggtaacatggaaatttccccaatattacttctatcagtgcataagcataggatatctttctgtctcctagtattgatctcaatttctttatttatatgttcaatgttttcattggagaactccgtcatcttcttggttgtgaatggcagtgttgccatgatttctttctcagcattattgttttgggtttatagaaaggtactggtgttttgtaaattgacattgaattctggcacatcgatgaaagtgttgagcatatttagaaaatttctggtagaattgttgggacctcttatataataccattttgtctgcaaatattgataatttgagttcttcttttcccatttgtattcctttaagttccctccctcatcttgattgctctgtgtagggtttcaagcactgactgaaaaggagtatggaccacggacagccctgttattactcctcattttaataggattacttcaagattttcaccacttatgataatgttggctgtgtttttgtcatacataaaccttgttgtattgaagtatgctcctttcagccatttttctctaggattttaacatgatgcttgatcgaatcttactaatggccctttctgcatctattaataaaatcatatgatttctatctttaggccattgttgttatactaataaattaacatgttgaaacacctccgcatttcttgtataaagcaatcttgattgttgtagcaggtgatctttttatatattgtgcaatttgattacaatcatttttaataattttacgtgatttacttattttatgtaattgtgtatgaatcctttgcctgtatgtacatatatgcactacaggtatgcttcgtgcctgctgaggtcagaagagggcactggaactggaattagggaccattgtgaggcactctttggggtctgagaactaaacccaggtactctatgagagcaagtgttcttaacctccaagccatctctcaagcccctaatttgctattttcatctatgtcagtgatattggcctatagcattggcctatagttccctttataaattttataaaaagttaatcaaaatagaattattttcctctatgtccgtggtattggtctatagttctctttttaaattttaattaaaatataattgtgtcaccttcccctttcctttccttcctccatcgcctcacaggtccactttctcagggttcccatttcccaaacccactcatctctcaggttcatagcctctttttctttgagtgttgttgttacatatgtgtacataagtacataaatatataaatacagtccgggaagtttatttagtactgtttgtgtgtctatgatttcagggcagccagggatatctacaacaccactcctgctcctgaggctcagggaacttcactgaagagggaggagaaagactgtaagagtcagaagaccaggaagtctgttgtgagactgtgtctcctagaaacggcagggaagactcacttatggtacctcaacaatatggctacctaaacagagttgaacaatggcaacaccaatagacatgctacttcataaaggtgatctcatggactccatgaccagaggaagaactacaaataactgctcagacagggagaattatttctcttttgtgttgtgtctttacctggaagttacaaagcgtttgacagaaaataattgagggaaagtttcaagaaattttattgaatttcatgactgaatatttagtaagatctgccactattcttctgttacataaattgcacagtgtttctgttttgctcttggcattaaaaaaatgatagtatatttatcctgcttcctgttttacattttgcttactctgttaaaaaactttgataagttcagttttggtcaaatatcttaataccatatgtaaccaatttacacttccttttgaatattctcatcacagagatgacagaaagacattccttacattccaccttcaccaaatgataaaatatgcagttattaatagcttgtttatttttgtgaaagctgttgaatagtttcctctattctccaaagttggaaatcaatgagagacaatagtctcttaaatacattgctgttaaaacaatcagtaatggggtgaagtgtgagtatgataaaatacactgtaataacctagaaattataaaagatctaataaaataaagtaaaaattaaattatgaaatagtcatcagtatggggtcaatatttaacaaatgggtttttgtgtgtatgtctgtgcacatacatatcttttcacaaaaaaactgcttttttttttacaataaatatctcctattagaaatagcttttatcatggaagtccaacttggtctatcacaatctttgcagaaatgtttaccatttgcatcattagatattgaaaacatctcattgcaatggtcactgctgccttcccttctgctctctcctcacttctgagaggtacagaatgctcagaaattggcagaattttcttatcagtagcattattcttctcagagtagtggaaagaaggaggattgaaaacttcctggcacccttagaaaatgcttgggacaaattaggtgaaagtctcagtcatgtgctcctggatttcacctttccacagaagtcacagagtgaatgctccattgactcccagagcaagtgaaacaattcattaaaccagcagcaatagcccaaagttatttttcaatactactgtcttactcatgatctttctaaaagccttcttcatgtcgttattcctgaggctgaatatgatgggactgaggaaaggggtaataatggtataaggaattgctatgagcgtgtcatctcccccagaagcttctggcttcagataagcaatagatgcaaacccaaagtggatgatgaccacagtgaggtgtgaggcacaggtggaaaatgccttttgcttaccctcagctgaagggatcttgaagacagaagaaaggatgaacacataagtcaaggagatgagcaagaatgtacccactaaacctaccattgatatgagtgttacaatgagttctgtgaggctattgtctatacaggacagcctcacaactgccctgatgttgcagaagaagtgtctgatgaggttgggtatacacaaagacaccctgaatgtcagtgcaatttgtataaaagaaatcaagaagcctccagcccaagcagaagccacaagttgtccacatgcaacattggtcataaggagagggtatctgagcgggttgcagatggccaggaagcggtcataccccatcaaggtgagaatgatgcagtttgttccaccaaggcccaggaagaagcacatctgcaggccgcagcctgcgactgaaatgtgtctgtcgttgttcagcagatccaccagcatcctggggatgatagtcagggtgtagcaggtctcagagaaggagagtgcactgaggaagaggtacataggggtgtggagagacctgtccacccatgtcaatcccatgatggtcaggttgcctgcaagagtgagaatatagaggcaaaagaaaaccccaaagaggaaggtctgtacatgtgggtaagcagagaagcctatgagaatgaattccttcagggttgtttggttgatcgccattgcttctgttcctgaaatgtgagagagaaacagacaaaccttcagtccttcttattctttaatattttcaagtgaaatgcatggtgttgataagagaaatcatcagacttacaacagccaatcaattttccgttcagtttagtaatgctcagccctgtaggcatataatgtgatttcttaaatattcattcatttcttcagcaataaattgttaatgatatggttatgtccagagggatcattttgacgtatttaaagcattctattggccggcaatgtgatattggtgaaatactccaattggtattcaggtgaaagatgctcagatacattagctgagtgagttttcaccctgaggaacttactcagtggataatacatttggtgaacaatggtgaggatggtacttcaaaatacatcacccaaataaaagctggacaagcctgcatcccaccactgaggatgcagagacagaaatacctgaggcaactggatatacagactgtttggagctggcaatctctgacttcagcagagaccgtgcctctgtgagtgaagtagagagatacagaggaagacactcagtgacagctttgagccttcgtgcacacccacacatatgtgcggaaaaatcatgctcacacatgaccatgaaaatcataatataaagtaaaagaacatgctgtagagtaaagggacagagttagttctctatagacactcataataataaatagtctgaaaatgttcactaaggagagactgaggatggttctgaagtgctgtggcttacaactgttcgtggtgaaacctgaagtcatcttttcttcttgaagaaggcacctaggtcctaagatattaaagaaatgctttcaaagttgctttgcttttgatactttgaggaggggagcatggaagttaaaatatcccagcattcaacacaacatggcatatcaagtcccagtaagactaagcacctccccatgtgttaaggctgggcaaggcaacccagtatgaggagtaaggtcccatgcctgtaaaagagctggagacagctcctgctcccactgttaggagtcccacatgactgaccaatatatacaactggatcatgtatgtaaagagcctaggttagtcccaagcaggctccctggttgtcagttctctctctatgagcacaggttagaagattcagtgagttttcttgtggtgcccatgactcctctagctcctacaatcctttctcctcttttgcaggattccctgaactctgcctaatatttggctgtgcgagacctaccctttcctaaacagatatggagatggagttgattggggggtgggaacagaacgaggtttgaggcaggcactaggaggagatgagggagggagaagtgctgctgggatgtaaaaaaataaatttattaaaaaatcctaaccttcaatttgaaaatgtttagttttcataaaatagctcagccctaaataagagatatatacatatgtactcagcattgccccgccatcaatagtctagatacatcacagaagaggaggcaggaagaatgcaagaagtggatgatgggaagaatacttggagttgctgccttatggcaattatatggtgaccccaatcatgatcgttacacatgtacaatatcaagccagcccaaatctcagcatatagagctgatggtctcctgacctgattacattctcattatccattgtcaagtagacagcttcagggacagagaaaaatcaatctttatagaatatttggccactggtaggtttcctatactccagtggttacacccatgtacatatggttagctgttatcaaatttagtggactatcaaaaaaaggaagacagaccgggcagtggtggcgcatgcctttaatctcagcatttgggaggcagaggcaggtgggtctctgtgagttggaggccagcctggtctacagagtgagttacaggacagccaaggctacacagagaaaccctgacttgaaaaaaaccggaagattggagacagtgttcagatctatgtgttgggagtcgaaacatagaaatgggctatagatatgattatccttcattgtatacatatatgcattttttaaaaaaattagagaagaattaaaaagaacagccctggatattcaggagtaataatgattagatcatgtggtactgacagacttgctgtttaagcccagtgcaggagggactgagattttgctcagatcatcattaaaaaaagagacatgctgtgaagtcactgtgtggactcttcagcaactttgatgtttttaatcttagcctcccctgacttccacaacatgatgcctgtctttataattaatatattcacatttctattatacagagctattttcctgtctcacatgtcaatgttttttgataactagcatttatggagtctgcatttccccaaattctttcaaatgtttattgatttctcacttcactgcataaatatgaagtgcacaagacagctgtgatctgtgtagggcagaggagattatcttaccttggatataattatatctaggaggcagcatatttgcaactattcacactgttttgattccaactccccatttttcccactccccagtgttttcctttcaagaatgtgaccacaatcgatcatcatttctgtatttctcaaagtgatactgccgaacactttaagaaaacaagaattcccaatacgtgttgtatggctaagttaagaatcaggaagtgactaatccagaaacaatgtctgttttattttttcagtactatggtttttgaatatgtagaatacagagtttccatattgtttcgatttagttccgtctagagtaagcttcttatggcagagtcactcttgccattgtcaggagaggcacagaaaactaatgtaaacacataagtgtcttcagggctaatacacaaccctgtgggctccaccttgcatgtttctttggtttgtctgtcatcttccacctgcttcagtcatcattccttccatgctgtgcatgaacaacatgctgtcattttccttctttttttcccttccattttcccttcctcatgtcatctcagtaccttcttaatctgtgaataatcatttctcagttggaaggtagggagtttctgttctcttcataggtattttacagagggttgttttggggaaaccctggcctttctcatgagttttgctgtataagcctcctcagtatcagagtatattgtaagtcttccaagtctcaacacttacttacacagtattagtccatttacccctaggattactttcctgtagcattctgggccttcactgttagggactcagaaaagctgggtccctaaagttcttttctgttgtaatctgtcactcaaacacacattgatgggagtcagtagaacattttacacaccaatactcttaagctctcacactctttatgtagcaactctgtaagaaagccagttctatgtattctaaaataagaggagtaacttattaaataacacaatataacacttaagcaaaaagatgttgatttagtttcagtgtctttagaacaaaacccataatttttctataacatataaatacaagttaatttcatattttgtatacctgtatagttacttccaacaaaatcatgggatggggttgtttgcaaagttgtcataaatattaaaagtgttttgaattgaaaacacaggtgtgatggctcaagcctgtcatcctataattttagcacacaaatgctgaaacagtagggttgcatgagtttgaggactgcctgggttaagcagtaacttccaggcccgaattggctaaggtgtaatattatgtttttttaagaggagctagagagatgactgagcagttaagaacacttgctgcatttcctaaagaccctagctcagtttccagtacccacataaggcagctcaaacatgcctgtaactccagctccagtaattggatacctcattttcatatatttcttaaggtgtcactaaatctactgcccaggtttagtttgtattatcagtctatggacaagagaattacatatgctcttcaatgacaaacagaaataatgacgagggacatagcgctgtcccacagatacttcctttctgtggtgataaggatgaacagaagagagacagaagagctagaatactttcctacctttcatttagttaaattccaaagccaagtatattcttctggaagatattcttcacagtgttggtgtcagtatttgttgtctccacgcataagaaataaaaaacaagttataaaactcacttgtcttaagggtctggattctcacttctattgctgagtgtctggtgaccttaagaaaagttgctgttccttttgtatttgaatttctgcagttggcatggatggagttttctgagtttgtgcaaccttcctctttctgtggctctagagttgtgtgatatgagggttaagtgaataagtcacctgtgtgcatctctcaccacccactaagtgaccttaggtggagccttgccttctgccactatgagaagttgtgattattatcaaaggccagggctccccagctcttgaggtttgcatgggtctggttaggagcgccccagagatccctgttgtctttcatcagagaaggaagaaaactttcctcctcaactttataatttgctctcattagttatagggctttgagtaacatgcaacctttaaaacacttctgcaaatccttgggggcttaaggtgtgcagaattcatcatgcccacaaacaatgcttttgtctggcaggaagcccgagtggaaactgggacccctagtgctcactgagttttcattttgtaacacagatgctgctttgaataaaactttagtgtacctctttccccttacttcttatttagcctttggccccaggctgcaatggccatccttgttgggcctaaataagccagctgtagtgaaagtcttgctatgtcaggttagtggaaatctcccatctgattaatgtagctacccttttcctccaggtgatgccaggttatgccaggctgccttcagcaagagtcctattagataaatgtctcagttatttctcatccacagactcccccctcccccaaccctgtgcaattgctacatctctgcttttccattctgtgtaaaaagaagtgcctgtaccccattgttatgtggattgttttctttcttgaggtttcgtttttagttctttgtgtgcactgtactaactttctctcagatacatagctggtaaatattttttttttcattctataggctgcctcttcgcttgagtaattgtgtcttttacagtataggagcctgttccttttctgaagtcctgtttatgagttgttggtcttaatacctgtgctagaagggtattgttcagaaagtccttggcactgtcaatgaggttacgcctacccccttctttcccctttatcagaatcaggataccaagtcttacgttgaggtccttgatccatttggagctgagctttatgcaagatgaaagacaaggatccactttcattcttctgtgtgtagccatttagtttgaccagcaccatttgttgaagatgttgtcttttctcaaagtttattattggcctttttttttttgtcatgaatcaagtggctgtgtgagtgtggattcatatgcggttcctcagttctattccattgatcaatgtgtctggttttatgctagtgtcatgcttttttttttattaccattattactatatcctacagtgtaacatgaaatctaggatagtgatccctgctaaagttttgttctttctcacgattgctttgacaaccctgggtctttttgtttctatattaaatctgagatgtttttaaatggagacgttctttgggatactgattcattggcattgcaacgaatccttaagattgtttttgtagttggcctagagttcccaaaagatgaaataaaaatggctgagagacagtaaaacagtatttattgtccttagccattaggaaaatgcaatttaaaactactttgagattttgaattcctaagatttaaaacaataacaacacccctcaccctacacacacaaatgacaacaaatattggtgtagattttgggaaaggggagaaattacccatagttagtgagagtgctaacggatgtagccaccatggaaatcaatgtgacactttctcagaaggctaaaaacagatttaacataacactcctgggcatatacccaaagtattatacttgctagtacagatattcttgctcatccatgttcattgctgctctattgataatatccagtggttaagagcatttactgctattccaaaggaactgagttcaaatcccagtacctaaagggtggctaagaattagttgttccagttctaaggggattcaatgtccttttttgacctctgtgggcactgcacatacgtagtgtacagacacacatctagataaaacgagacacataaaacaaatcttaaaaaaccatgaatatgtaataaaaatgtggtataatggaatattattaactgctatggaaaaggaaattatggaatatacaggtaaattgattggtctgaaacagtcattcagtgtgaagtaactcagatccagagagacacaaatcacacattagaaaaaagtcatttgtgaatgttagctttgaatcatcagatatgtatcctctattctccatttggagtactcacaggggtaaagagtcattcaagggaattttaaggcagtggagattgaatgtagtggagtataaatggatagaagagaattatggaacaacatgatcaaggcaattctcataaaaaaagcatttagttggggcttctttacagtttcagaggtataatcctttatcaccatcaacatggtgggaccatggtggcacagatgacattgaaatagtagctgagaggtgcatcttgatccataggttgagagacagaggctggacttagtaggattattgaaatctcatggccaaccacagtgacacagttactataactgggacaatcctaatcctttccaataatgacattccctgataacgaagtactcaattgcatgagccagcctatggaggccattcttattcaaatgaccacattccatttcctggcctccatattatagtgtaaacaaacaatcagtccatcttcaaaagtccccacaatttattacagtctcaataatgtttaaaagtctaaagttcaatgtgactcctgagatacaaggcaatctcttaactgtaaactctgtaaaatcaaataaaaaattcagatcacatgcttccaacaaaccatggcacagaatatacattaccattccaaaagagaagaaagacagcatagtgagaaaatactagagtaaaacaagaacaaaaatcagcagggcaaattctaaattctgcatttccatgtctgatgtcaaagagctcttcagatctccagctcttttcagctttattgcctgaagcacttctttctcttggactggttccacacttggtctgtagcaggtaccccatggctctggcatcttgaaaaccttggggctcccaaggcaatccagtcttcatgttcaaagctttacacaatgtcctctctggacctacattcagggacacccctgacatcaccactgataattggctctcccaagggctcctcttggccatcctgttgtttttgtcatggacatgctgctgttttggatctgtaggttcctccccttcacaggttcaaatattcattctgtggggtagccctggttctgcccctgagtggtagctgggttggtcagctctccagctttccctcatcatataacatatcttagcatttatctctctatattttcatatctgtaagaagtatagatatcactcattcaagttatacaactccttgtgatttatagaaaacctaactgaaatcagtatgatgttcacatctaggaaaaactatttaacttatgactcccacttagtacaattgaaagcagttttatattaaaacatgattctaaacatctctgaaggttggaggggagagcacagagcaggcagactttcactgaaaggaaaacacaggagcaacttcctgaaaccttttttgttgccttatatattccatctgggagctgatgcaatcatcaaccaagaaatgccaatagacatagatttaaaaaatatgtacttttaagatcttaagtcctgatgcctttttctgaagacctgaaatgtggcagcctatcaatataggaaatttctggtgacaactgttttacttcagccacacaccacagaaaatacgactaactcatttttatttatggccagaaaaggtcatttacagaggctagcatagccttttgaatctgtaacaaagtgttgcaaggccttaaagaagtggtgttaactatggctgactatggatttcaggttcctgctggtaagtaataatctcccctcctgatttcctctatgagaaatggctggaaactagtatttctacttaaatttggaaggactcaagccgagttgtaatttgtccactcgaagaggtgcctggtgaaatggaggcttttgaagttttacataagaactcttcctggatggctagggtggtgtaaacagaaacacattggggaactggaaattgtattctcatcctgctctcaggagaagtctctttccatccccagtaccaacagaagctgagtaggaaactagacttctgggtcaactgggagcgaaattctaatttcccactttgccctgatggagtggtgccagtggaagtgagatacaatgagagatttaagtaagatcttaattgccatgatgtgattatcaggtttccagtcactcataatatgaaccaggaaaccttcctccattgtttttaaatctcatatttctttggtgacatttcttacttgctgagtatatctcaaagcataaataaaaagaaatgcactctaatacacatcagaatcaaatttctgaaactaaagacaagggtggtggtggcacacaccttaaatcccagaacttgggaggcagaggcagacagatctctgtggtctgcaagagctggttccaggacacttccaaagccacagagaaaccctgtcttgaaaaacaaaacaaacaagcaaaaacaaaaacaaaagaaaacaaaaacagaagacaaatcaccttacgatcattaacaaaaagacaggattgtggtttgactgtagaatgtgtcctaagggcctaggtgtctgaatatgtggtcactattgctggagctgttatgaaagtttgtagagccttgaggaggcagagccccactggaggaagtaagtgttggctggtgttggtttgatagcacagctccactccttgtccattgtgtgccttttgactgtgggtgcaatatgaaggcaaccccaggcatatactgctgtgtctttccatcctcaatagactgcatcaactccaactgtaactgaaataatcccttctttcagtagatttccccagtcatgtagtttgtctgagctataagagaagtactgcaagagataaagtaaactggagcatcacagatttctcatgaggaactgaggatgtgatctgattttgcagaggcaatatttttgcaattgattagtgacatactttcaggagatctataaagcaggaacattatagaaaatctcaatttccaagattcactaacatctggagcttactaattctctgaatatttgatagaaacaactttgacactaatttcattttaagcttttaatagtagatataatgaacacatcagtgggagatttctaataacacaccacatttaaatttgtttgtataaaaagcatatgtcttattttaggactgccaaatctaatactttgttgagttaaaaactaacccatcataaagttataagtaaggataggatccactccaaaatggatactacatttaaactcaaaatactaacttaagtcaaggtaattttatgatgcatattgtctctacactgcaaatgtttatcccattttctcttcagtgtgaaactatgatcctagaggatcatgttgaactttattctgtgcattttgcattattaaatcaatattcttttaaagttcagtttttatttacacacagcacgatgagcagagtaggattgacttggtagtgaagagtgcttgtacagggccagagattggttatcagcacccattctagagggctcacaactgctcacaacaaaggatttgatgccctctcctggcctccctgggcacctgcacttatgtgccattcactcaagcgaatatacgcccatacataaaagtaagccttaagaacagcaaagatatgctaaagaacctcctttaaggaagagagtgagaactcacccatgagaacttgttacagaaaagaatgaggattgctcaagtgatgggcattggttaaataaaaaccactatgcataatgatatattttctgttattttatttataaattcatgtctagaaatgttactaaaataattccacaaaaactttaactggattgtgcttggaatgagtgctaaaattcaaagaccaccaactaaaacaatagttcaaggaaaacagtcagaaagcttgaatttacactaatacttaactttatttcaaataattcccatcttgcgcatgtttatgactggtagaaggttatcagggatagtattgaagtagaaggaatattttttagaaaaggcaatatttttattatgacttcttgaatccttttgctactgtgtcaccagttggctttcttatgataaaatcatattttaggcattgcatttaatgtttccttgacttagctatctctctcaaaaatagagataatattattaatccttaagtatcacactgaatctataaaatggaattaaacattttattcatattaaacatttaatccataagatagaatttaatctttctagtgttgaactcatattaccagttactattatggtttccattgcacaagaaagtagagctatacagcacaggtgcgcatactgaagaaacatgttttgataatgtcaattgtatacactgattaacctaacctggctttgggaactttgggggattcaagctattaaaagggtgggaagtggatgtaaatctggatacagccattttagatttatagaaaaaagaaagaagatgaaaataggtgatgttacttgtttttaaagactgacactgaacaagggtaagatgaggatagaggaatatattgaccctcagagatcaggcacatcttcacgatggcctttagactggacacatgatgaaatagttgcaactagttcctcagtccacagtaagaaaatgccagttcctgttttcttataagcatgttttataaattacacatttttttctgtgaatttgaaagcacaagtcccaagtactggattcttggatgagtcatttcagctttactggactcagtttccctgtccagaaaatgtagcataaccttattttccttatttcaagctttaaaggatatctagtatataaaaataatgtatttattcattgcacactagatacccaaattattgtggcttgaatcatgatcttagcttctctttgttcacatttctcgaaggatagtcccaagtgacaataagaagcacaattagatgtgtttcctgaaacagcactctatggggactacagaaccctccaagagagaaactgtttggagagaagccaatacacatcgccacctggggctaaagttgccaaaggaagctcctggtatcactgggacacatcactactctcagaacaggagcttctgagacagacctctagtcttactcacccagagaagtcttctgagagctgcctatgtcatgactaccaaaaggcaggactcggtcccactgtgatcttcttcatgtgagtgaatactctccttttcttccccggcactgcctgctctcattcatgccctggctcacagcaaatctggcggtgggaagtgtagtgctgcttaaaggctgctccttgggctagccaagtctgatgcgcaagcctgtgctgcactctattctccctccagtgctcagcatgttggtaacatgaaaaagaagcctgctccactcagggaagggatctgcctaggatacaatggctgggaggggggggaatgtttagatccaatcaatttatattgagtaagatacttgatctgtacttattaaatacaattgtcccacagtgtccgtagagtaaccattgtgtgaaaaactaatgctgaattataacacagcaaatctgttctctagttctgccttggtttgactttaaaaacgttacctctgttggcctttcttgcctaatctacgaaacattcacagatccttccacctctaccatacgttttaatagacaatgcgtttgtgcttgtttttgttttttgtttgtttgttttccgagacagggtttctctgggtatcagcccaggctgtcctggaactagctcttgtacaccaggctggccttgaactcacagagatctgcctgtctgcctcccgagtgctgggattaaaggcgtgcatcaccacagcacggctgtatttgtggttgtctaaatgtattttcttaggtataaggttaggatgaatgaatacatggtgcatgtatatccaaactatatgtgaatatatgtcattcattacataaaagcacaatgtactggcagtgtggtaaatgtgtaagacacagtttgagtgatatatatatatatatatatatatatatatatatatatatattcatgtgttcttattccatgtacttagacatatagcttgtgttatttggaatgtgtgttatgtgtacatgcttttgtctaattcagtacataattttctaaagtgtcattacagcataaatcagagattctattatgtgtgtgttcccaataggtgagaagaaaagccatatcacttgcatctaaagaggcatggtggaaggaatcatcagaattatcaggactatcattccgaatggcacaggacaatgtcacctgctggaagggctttgtcttcctgggcttctctagcttcggggagcttcaacttctgctgtttgtcttgttcctctctttgtatcttgtcaccatcactagcaatgtcttcatcatcatagtgatcaggctggatagccatctgcacacacccatgtatctcttcctttccttcctgtctttctctgagacctgttacacactgggaatcatcccgaggatgctctctggcctggttatggggggacaggctatctcctttctgggatgtgctacccagatgtttttctctgcttcatgggcttgtaccaactgcttcctcctgtctgtcatgggctttgacaggtatgtggccatttgtgcaccactgcactatgccagccgtatgaatcccaccctctgtgcccagttagttggcacctcctttttgagcggatacctttttggactaggaatgacactagtcatttttcgcctctcattctgtagctcccatgaaatccagcactttttctgtgacacacctccagtgctaagcctcgcctgtggggatacaagactaagtgagctgggaatcctcatcctcagcctgctggtcctcttggtctccttcttcttaattagtgtctcctatgcctacattctcgtagcaatcctgagaatcccctctgcagaggggcgaaggaaagctttctctacttgcgcctcacatctcacagtggttgtcattcactatggctgtgcctccttcatgtacttgaggcccaaagctagctactctctagagagggatcagcttattgctgtcacctacactgtggcaacccctctcctcaatcccattgtttatagtctaaggaatagggctgtgcaatcagcgctgagaaatgctttccgagggagtttactccgtaaagggtgaagtctgcccaaagacactctcctttgtgtaagcaggttctggaccaggctcaattcaatggccacataaccccaaattttgccaaaactgctgcatcccaaaggccacacccctcctctgcttttcctcctaggatacctgaaaggataagactggatttcctgctctggtcacctggctcaatacacagtgcgttcaaaaatcttaatattcacctttaatcccatagatgccattcccaattatcaaaactcaacaagaagtaggaattttcttaattcactaatttcccagcagagctaaacaagatgaggaaagttcagagtgtttaagttcaaggctaggatgtcaggatccaggtacattgttgagaattgtaacatgattagacaatgagaatatttgaccagtaacattcatctaatgtctgaaacttggcatgtaacagtctggtagatgccagacagacagaagccctgctgctgcatttgtttctcattcctcaacctagctatcatctttctgactttgttgtagaactatttattttgcctgctccaccttccacctatagtgttctatatatgttctgctgggtgttgttagggataaatgaaagtgccctggcaggagtgtgaacacaagctcctcaaccagctgtgataagttgggtaagtcacttagcattttcaccttcaatgtcctcatttgtaaaatagttatcatcccccacttttgtgttggtgactaaacatgttatatttagatcaagaattgatcaatatactcgagtcataatcatttttaaataaatgtaacctgctgctcttaataatgtagcatggagagggaatgttgacttttagttcatggaaaggttactctaggtgaggaccagtgaaggcttcatgcctaaggtagcacatgactttgttcctaaagaatggctgggacatttcctcaactgactgggaccttcagagaagttgacagaataacagaagctggggaatgtaacactgtgggtttgtaacagagctgactgggttgttagagaggatgaaaacttccccagataagtgtgttagcagtggtcatcagttgaacacctaacttcatatcaatttgaggcagggccaagctcctccccctgcaccaaggctgggccaggcatcccggcatgggaaacagattccaaaaagccaggggcagatcctgacccatggctaggggccccacaaacagaccaggctacacaactgtcacccaaatatggaaggcctctgttggtcccatgcaggctctccctatgtcagtctagattccacggctcccactggctcagatcagttgtctctactctttgccctgtcatgatcttgaccccctctcttgctcatacattctctcttccctctcttcaactagactcctggagctcagcccagtgcttgtattttaactgactcctgtgataggattctttcccccaaagactgagaaggggttattttctactcaagtgaaagaactgagacttaatattgtaattaagggacaatattcatgggtgagggactctttatgcgaaacattaacagttttacataaggaaaaacattatctaagaaatgtatctgtcctgaaaatacccgcaataccatatcctcttagattttctccttaattcataaattatgaacactttctctgacacttaaaataagatagaaattaataaacacaagcatcatttgcatcctatgaaaatttaagagagtattcgaggagttagaaaggaagaggtaccagaattgtgtctttctgagagtagaagcatccactctaacaatgaaatatgaaaacaggaaagaagttttctgttatctttgtgtggttcttcttcacagaaaaagataaagtgacacacacttttattttcaaattgtaagaatttgaacatactccaaagcttcaaactgaaaatcaccttgaattactacttgattattgtccttcacagtataattaactacttttatttagtaataatatggttccccaaatgcagaagcacaattttagttaaatttcccctttaaaaagaaacatttctatgatcagaatgaagaaaaatcttaaaggtgttcagaatacatacaaacacacacattcaaaccttagcaagctagttaaaggctaagtatattcaaataatcctatacctgtctgtcctctctctgcaacatccccagaaacttgataaaaattttatattttgcaataaatgtaaaacacacacacacacacagacacacagacacacacacacacacacacacacacacacacacacacacacacacacagagcgtcatcttttcttcttccacacttgtctgtgcttcttatccctcaacatttcctgcaacaccatgatctacgatccaaaagaatgtggttatcaattgccaaagaatgtattggtgaagccaacatagtcgtagccagcaggttgacttcgaccccgtgggtccatatattgttgcatatgtatggtgcagaatgacacttgttctggggttagagcctgaaaagaatgggaagagaaagacacagttacagaaatccaacactagctgtttctgtgtgttcactacctgtctgaaacacaggaggtagacagtcttcatgagaaacagccttgttcctatcactcctctctcttgtaaattcatgacttccagtgaatgaaaatgtttcaaatttctacccaagtctttttttttcacatccacttctttgagattttgagacaaaaatgaagaaatggtttattatggcatttcaaacacaatttgattttgttgatcttgccctccctcattcttttcccccaccttcctgacttccctgtacccttccagtcccggtagtcctctattcattttacatgtcccatgggtctgtcagtccccacttgtacttcaaacgctcttttcccctcttgtggttccctttgtagttccttggactatacctactcaaacccacctctgtccatgcgtactgacaccatctagggttccagtgtgagataattcagcattagcctttctgagtcctgattgccacactaaatacaataatttctaggttcttcaattttcctgcaggcttcatatttttcttatgacccaataaattccatatatatatttatgaagatagataatggaaaaaggtgatatatatgtgatatataatatatatccatatatatcatatatttcattatttagttaatagttcatggacatctggaacttaaaactttgtatttcctaaatttggcttattaagtagaaatgacatcaattattgaaaaattcattgcaagttttgaactgattgtaatagtcagtagataacctttagaagttttttgagttggagtgaggtaaatgacttaactgtaacagtgataccttgtgaaacagaaggtctgaggcaatacagtgggtatttgggtggctgcttatggaggaaacagacaatgctatagtgtcagcacagaagcaacagcaatgggaatctcacctgtttcatgtcctccttggtaatataggccttgccttctgccagggcttggaatccactttctatgtcgtcactggtcttgatgttctctgactccttgtcaatcaggaatgatgtgtagtcctctagagagacgtagcctttcctatcagggaaacagagcaggagctgagccttctcaagacaaggaaagtgtattccttcaatcctgtgtaatatctcaggacagagaatcctctgtagttctctttcaggtaatctctctgatatgtgggtgttctgcactctgacccctatcatcctcttctagacaaacactcagttctgagatcccagaagagtctacatgggtcaaagccatgttttgtttttccttttgaatatcctatcatttcaagtcctttgtctgcttctatctttagaatcagaaagaattacttccttactgtaacttggctctgtcaagtcctacaagcatgcaagactccaccatatactgtgccctttgaattatgaatttcttctgaagagctcacagaaaagagaggattcctctctcaagttcctccttcagaaacagctgaaatttacaggctaaacataaaacacaagttgagaaaactgtagagcttgggactaagttggcacaaataccatttacttctgaaccaatctcaaaaacaaataaagcttctcagttgtcttattgacctattttcaagttagttaattttgtatttcatggaccatttcactctatattcatctccactaaagccccaacccttgacctcttcctcttacctccctggatccacagcattcaggaatttctcaaacttgggttcaggttcaccttcctctaccataggcaggtagtaattgagtcctcttaggcaggaccggaactctttatgagtcaaacgccctgtcagattctcatcaaagtgtctaaagaacaaaaacatttcttcaggctcaagaaagctccatgttgaaacagaacagatcaggtcccattgtattcactagatctttaatgcatgccataagattgctggaacacagagtagagaatccatccatagccctgtgtgttttgttaaacccatcaaagggaggactaacacaaagcactgaatattcttctctcgagttttgccctcagaaagagctgaaattcacagagcaaaggtaatcactcattgaatgatgttttaaagacacattttgtttttaaatccaggatctcacagattattaaaattagatattaaaatccaattgtgatgctaattcacatacctaaactagatctttactgaggataatcaacacacctagactacttcttcactgaaaataccatcaagatacatagagggggaagttattatttgtaaacttactctgaactttctaaaagacaaggaactagtcaactatgaacttatacttacttatatgtggtgctaaactctttcagtgtctcttcactcacacctatggtgtccctggaaggaaaattatgagttaactctgtaaataaaacagggaatgtcaagagactatgttaccaaaggttgagagattcacacaaataatgtattatttgagctatctagttcagaggtggacaacttatgctccaggagtcaaattcagcttcctattttttttaacagcccatgtgtcaagaatgctttcaacatttctttgtagttgaaaacaatcaaagcaaaattattatatgaagcatgaaaaatatgtgaaatttaaatttcaatggctgtaaataaagttttattggaacacagccatgttcattcagttatgaattttctttggctgcttgccagtatattagcaaaattgaaaagctccaacagaaatttaatggtttgaagagacttaattatttataatgaggtaatttacagaagatgattgtcaatttctaaagtacaaaaatacaacaactattgagacagaaagctactgtgataggtttaatttatctaggaaagattaatttcttcacttatgctctgttagtccctaatttgaaccccagttctagatattatattttcaacagaattttatgaaagagaatggtttctgaaagatcacacaatgttaaaggaatcctgaaacctggatgaaggactcatgtgtctaggaagaggatggtacacacacagggagggataacctcttatttcatagtagaccctggtataaagagaaatagcccagttgtggagcagaaaatagagaatattggtaggtaagtgtagtatctctgaagcacccatttatcaggtgtcctaaatccagcctagttaagctacaacatgtaacaccacggcccctctccatgccccaggtttaaccatcattacttagcctggatctgttgctccagattgtgttgcattcgcatccccagctggtgcagctgatcccactgctgggccagtccaatggtgctgtatttgatgtcaaggatcagagcctcttccatgttgtcccccaggtcttcgatcttagtcagatgtcgcttcattgcctgtatctctttttgcttcctctggaaaaagagaagagaggcggtcagtcaaaccacgagttacaagctaaaaggtaaggaagaagaggctgaactaactaatttgttcactttcaaaggtcctcttattctctatgaaataaggacaactcaggaaaactacttcacttccacagtcacccttttgtaaaacagtaggaagtttatgagaaatgatgtctgtcaccctggaactcagacaccaccagctctggtcattgcactgggtattatctccatcattcactggggctgagccctctggctcatctaatgcctttagtgtgtccacttgctgaactactccttcatcagagatgatgggatgctgttgccatttaagcaggttatataaaaaatttctacattttcccaaagcattccaataaggggaaactgttcaccaagtagtcaaaggacaaggtggctctgagggttgggtgaaaatattattattcttctctcattaggaaaaagttatatttagctattttttaatcctgcaaagaggcaataaagcatagaagacagagaaatactcttctaactcactgcctccctcagttgacaggagaagatttacgttcagttatatcatctggctgcatcaaataacagaaatgtactgatgctccaggttataggctaggaacatatacatctgttcttttatttaagagcatcagccatctttaagtagatcagttgtattgttgcagaaattgacacacaaagatttaattaaactgaggcccatatcaataatgtggcggtctgtagttaaaaaatgcaacttgacatcagagtaggactacaaccttggtttctcgaccttcagtaactgctacctaaaatatcaccaggttgcttctgtgtgttttttcctgtgctttttaaaattcaagcagtgtcttcagtgagtgaacaaacattactcactttatttgcttcgagttgggattccaaagttcctgtttccttgagcaatgatctaattaagaatcaaaagcaaacattctttgttataacagaaatccatatttcacagacccattagctcaaagcctctgcagttcattgtttctgtttctttcaagttatgtagattccataaaataaagtttcatgaagccaaattttaataaacaagcattctatctgtcaatctttttagatagatgaaaaggaaattaaagccaatcctagctcccctgtatctagaagaaggtgtcacatgtctttcttagttctactctcaaatttagtcgtcccttggtatccatgggggtgtctgtggatacatagtggctgttgcagttacaaaatggaaatgtggcatgcagtatgtgcacataatctatattgcttgtaatatccaatacagtttaaatagttgttagatacttgaaagagaatgataacaaaaataatgtttatatattctgtaaggatacagtttttctgaatattttcagtccatagttggttgaacatatagatacagttctcattggatatgaaggttttattctatatatttaagacttgtgagagaagtaccacctactgtgcatgcaggagttaggaggaaataaccttttttttttcttgccccacatctttaattaagaactattagattacggcgggatagtatacctcagccccaaagtttccttagctaagtattccaggacattacaagcaaacaaagataattacaggaaatactgacccatccagaaaataagccctggacatgatggaccggagcaggaatcatgagagaaaaaaagaaaacatatgttagcacaaataatgattccatttcttcatgttgatgacacattttaagtctgttttggtcacaaaataggaatctatacatccacatgctgcttccaaaacctctggtactctgggaaactcagagacttcttgaagcccctctcttcgggacaaggagcactcatagcaatcagtatgctaagtatcctgcaaacactacagggtaatataaaggaaccaaagccaggggcaaaggagggtgcattgatcacatggtctcagccagttgtacatctttagataagatgcatttttcttcttctttagtgtacaagcattaattatggattatctagccaacagtaaacctcgaaatatcgcattagtggcttacctaatgggcataatcttcatacattgaccatttattctaacatattacacatttttatgaatcctcttttccaggtcatttactcagaagatgtcctatacattatcttcacatacatcttgcacataataaatgaaattaggctctattatactactccattctcattatggctttagttggctggagacataatagctttgtattgggtactcacagtaggttctgtgttttggtcatgtcaataaatacatatgtgaccttgagaaagaaaatttatctacttgaattttccacacttgaaagcagaggtaataagttacactctgcacttttcaaggttgctctgacagttaagaactataatggttcttgaagtaccttgtaaagtgcaatgcgccatgcagtcacagaactattgttttgaagtgtgagtttacacaatagaaggggaagtgtgaatatcaagaagaaaataaaaagggtgggtgagaataatgggcacaacatggaattgtggaagtaattaaatccaaatataaatcagagtcaaaatacggtgatgggggcagagtagataatacctccttctgccacttacgccattcttattaaaaacagcatatgcgggggtctcggtttgaagaaagcacagcatacctggtctcctggatccattgaaggaaggcactggcactctgttcaaattcctgacacatttcaaagttcttaatctgcctagcttcttctttctttaactcctgctcccgctccttcaaaacaacaaagagccgagctgattcatgtggaaggacttcgtttatcataaaagaagtattttgtaggtataggtgcacatctctattccaaagctaaccttcttccacaggtagacattcatgtgcctatccatctatcatctatctgtctgtctgtctatctatcatccatctatatctcatcttctattgcttccttcaataatttttcaatttcccataaaccacaagacaacaaaccacaagagacacctactctgacacatatatacatgctttccaattttccttagataattttggttcttgacttcagccacagcctagttaatgacaacattccccttttcccctaacacctccaacttttacatggtttcactggtcatgcttcctatagcagaagatgttgggttgccgcactcccccaagataccttgatgatgtcaggcaggtgcttccagatccttcccagcacctccactgttaaccaggtataaggactgcatggctcatttaaggctttaatctgctggtctagctccaataaatggttgaagtcttcttgagccccagatagagaagctaagaaagcctcgtgttccttctgcagttgcctgatctcattcagggagacacagtgcacaggctctgataagtcctcctcagcattctcacaccagttattgaaggctgaagctttgtgtgcaaattccatgaatagctcctcagcctgccaagaaaagacaccctcattgcttctgataacgtcccataggagaagagaatattcgggataaaaacagtgtcttcaaatatttgcagagcagcaatctgagctgttgagactaaaattagcagaggtgctatgattgggtgggatgaacgtaagttagaggaactgctggggtttagccttttctcactgtgtgcaattccttaagctccccaccatctacagatgaagagagtgactggctcacaacgttctttcacctccattacactaagggtggaaatggcagttttcaatcacatcatttcttatttggaagtctggactgcagtcctacctgacacaggaaacactcttaaacaagtgttaaacaaggatctaagaaaatggctgatataaaccaagcatctgtgttctgtcctttacccactccctttctccccttcagcgtttgcagatggcctaccattacaattctttgactacactaagtcactttcctaccttcctttctcaaccttcttgtgagctcatcggagacctcactgaagcttaacacgtcacagagtaaacccgtcttctacacattgacccgcaccctgtgcatgaactacatgctcctaccctgctattcagagctacccatgtattcagaggactctgagcttacatgactgggagaaagaaaaatcatagcagttccaaacaagagataaggaatgtttcaggatcaaaatgcaccacaggtttttaatgcaatggattgaattgtccacatgatttgtctaagcaattaggaagatgaattttcttactttccaattaaaactggttagaagaaaattcatctaaatagagagggtgactatcctgcactaatttcagtaatccatatgctaaaataaatcaacacaaagaaaaatgaacaagatggacacacaatttatagaccacttcatgttatattaagaggttatggattgacagactctgaagaccccctatggaaggcctcaccctccctggggagcagaaagggtgtgggatagataggggtttagttggggggtggtggtaggggaggaggggagggagagggaactgggattgacatgtaaaacaatattgtttctaattcaaataaacaatggaaaaaagtattatagattgattgaatataataaaaatttaaaacaaatgtttttctatttaaaattatggaaaacagagtaagaaagttaagtaactttctatggtgaatgtgtatatgcatagaaagctgccactatgattgctttattttttcacttaagaattatttctgctgtgcctatatcctttaatagattgtaaattaactacaggctgagatgctgtgtgttttcctaactccctgccttaaattattgtcaagcacagttgttctctcatctagagataataccaacactgaaaattctgcttcaattcttctgtggtgctgaagataaaacccaggaccttgtgcattctaggctagtgtcctgccactgacttccacactgggatatattgccagtctttaatgtaaagtcttctacaaaatcttgttatgcagtccagtctggcctagaactcttgatctttttgcttttgcctgagtcagaaattttggatttttggcacgcacaaccacattcagctttgttgttgttgttgttgttgttgttattgatatgctttatgattgtcatgtagtacgtctcagaagctaccattggaaagagtactttagtctccgagatctacacagactactgcatttctggatccattatgtcatttaatagtaagactcagaaaagcagaaggggatgaaaatatcttcctgtctcatgaaagggtggcacaaggtttaagggtaagtaacacactcaaggatgccctcctagtaaaggagattaactgagaacatgatttacagttacttttccagtgacccttttatctgctttaaagaaatgtacagaaccaaccggtgccagttcagagttttggtacaaatgctttccactctggttctatccgcctctttcaatcactgtatgtagccggctttcatcctaagtcaagtataaaatttcttaacccattgaaagcaaaacagaaagaccttctatccattctaagaaaatgcattcctttttgctcaatgaaaatgttttgttgatctttttctctgtcctgaaatgcctgtaaaatttacaaattgggtttctggttactgtgtctgaattctctggctaataaccagataattgaagccctatcatactccactgcatttcattttcatgtcactctgttttttccccctccctacttccttaccttctgcagaggcagctgcttctctagcagcttctgcctgtgagctgcagaggcctccagaagttgctcccagcgcttcagcaaggctgcatgccgctcctcaatggctttgctttggctgtgctcagcagccaccagctgattcttcagatcggtgatttcagaaagtcgttcttgctcaaagctccgaagactggcatccagtgtgtccttagatgatcaaagagaagcaatgaacaggcacagtgaagtgtccaaaggatcactcatgccggtgcccaaacagacttttatcatgatggttaatgacaattgctagtgataggatatgtttaaaaggatggtagaatattatcagagctgggcgttggtggctcatgcttttaatcccagcactcgggaggcagaggcaagtggatgtctgtgagttcaagaccagcctggtctacaagagctagttctaggacagcctcccaagccacagaaaaaaacccaaaatgtctcgaacctgcccccccaaaataagaatattttctgaggagaagaaatataatttagagatttgaatatacacctgaatttggaattatggttaagtactagtgctgtatattttatagatcatataccaggaataaaattgctaaggggatggaacatgatatgatatctcaaatgtttataattacaatgaaatcctgcttataacacacatactttctaagattttgttaaattgttacactccactttaattaaaggcaattcactgttaggggccatggatatgcaagcttacaaatgctctgtacatgctggttatagagattaaatttttgcagaaatgttaatatcaaagtcacaaatttcaggaacactgtcagctttaacaaagcggcttgcgttaggacagttctatcatcatcctcctcctcctcttcttgtccctccatctttaaatacaaattctcactatgtagcactttcggcctagagctcactatacagatcaggctggccttaaagtcatagagatgtgccttcatctgcctgccaccacctgtttctgcctctgccgcttgctgggattaaagcccagcacattagactaattctctttttgagaacaattaaaattttgattttatctattttattacttatatgtgtggtgttttatctgcatgtatgcctgtggagacctgaggaagacattgggtcattttgaattggaatttcagacagttgttcccgccatgtgggtgcttgcagtcaaaccctggcactctggaaggagagtcagtactcttaactgctgagccatctctccagaacttctgagaacaaatttaaaattatcaaaacgtttattgtttgaatggagccagaaagcaactgaagtagctacaaatgcagggcctgcaatgcctggaaggaagagtattgcagtgacgaatattccctctgtctgtcccttctaagaataagatgagcagggtaggacattcacaggaaggcaccgctgagcctttggcaatcacatccagttcaaagggcaggaatagccactctggggaattgggacatccagttttgcagatgctatagaaagagaactgcagaattatagagtcactattcttctgtattttaatttcaaggcactttagattgcaaaaatgagcaggtagtgtccttggagttaagcagaaatagttcaaagagccccagatgctaggcatgcttccttgtggtgtcaatgagctgacttgaggacctatgaagcacacgctctagtgacagtgcttaggaagaagcagatgaggggtgcaggtcctcacacacagggtgtactttgtagtctcctaattcatgaccaaaaaggagaggcttggctggaggaggcggtaaagcttcaaatgaaatttgtgaattaattaccttaaatgtaaacatattcaactttccaacaaaacataatagagaatagcatggtgtccaaatatataatatttgtaagacacccatgtgaaatgcttcatccgctgtgcagtgatgatattgtggattcttaaagagacagtgctgaacaagaggtcctcaggtcacttggaccaatgtcctcaggagagatttgtgttgacccagtctctttcccgcttccattatgatcttatccttcctcccatgctcttctcatttgtcagtaactttgtcatttgtggtactgtttgaactaacagcattatactatgaacaaaatactgtctttaaaacgagctacctgtgtgcttattggaaggttgaagtcccgtagttccgtgttttgtctttgtgtgtgggtttatacgtgtgtgtctgtgtaaatggtaaatgcagaggctagaatgtgtgtgtgtgtgtgtgtgtgtgtgtgtgtgtacatgcagaggctagaggatggcatcagatgtcttcctcatttgtctacatcttctcctttgagacactattctcttgtggaaatcagaagcataaattctcgagatctttctgtctctgcctcccagggctggtcctgggtctgaattccactcctcatgtttgtgaagcaagcactttaccactgagatgtcacctcagccctaagtttctccatccaacatctaattagagtaacaaaactgccaatttacaggaatttttaaggatgcactagtggagaaaattagtaaaaccaaaaattgaagatgacaaaaacaaacacctaattgcaggaaatggggctgaaagcaaagagagagagagagagagagagagagaaagagagagagagagagagagagagagagagagagagagagagagagagaattattggcaaactaaattataaatattggcttctctggccccatttgacatggcatccttcactcacatgctttgccaagagtgtgagaaaggcagtgaggtctgcaccgttgatcttggtcttcagacttgcttccttttcacctagaaaccaaggaaagccaggagggaatattagatgattatttgtagtagtgggtgagaaagcttcggtgagaagtctggttctcagaacaggtgaccctggagaatatacaagcagtgggaagaatgggttgcctttctgtccttagacagaataaaactgactgagactcctgagggcaaaagaaaattgaatcgtggaatgaaggaaagttgaggtctgaacatgaattacaaacaaatcaacatacactgtagtgtgtatcctaggatattttgtggaggattttccttctgaatatcatacatgaatttgccagtcactagcaactgtgttctgtgggtttatgacatttaattctctaacgtgtgttttgtgtgtgtgtgtgtgtgtgtgtgtgtgtgtgtgtgtgtgtgtgtgtgtgtgtgtgtgtgattgtgtccagaaagaataaaaatgaatagttcacctcatttccagaggtaaaagaaaatccagaggccattcttcaaatagtactcttcaaaccaaggatggcagccctggcatctcatacctatccatgagtccacaacatcagccttccagttaaactgctggaaggcataatcatcatccagttgtaacttccaagtagctactgccttgtccagagaagttgtcttttcattcaggacttggatctttgtggaaatcttatccttgttttgagtttcttcctgcaatgccaaggttgagaggagttaggcagacatgctgcagagctagaaacatgattttttgccaccagtaaaaagctttcaattatcttatcctaaacacctaataccacactattgtaattgtctattgtaattattccattcctcacatgtgttcaagaatatttccattctagcatttggacaatttcagcatatttgtttattcaggtgtgattctattattgacatttcttgaagacacagggtcatctctagggatcaatgaggctttgtaaagatgatgaaagcaaaagaaagatcacaaactgttaagatgttcttgtgtggtcctcttttcaagaggcctagaggacaatgaatttaaggctcttggggtgcgccatgtatgtactggttagttttatgccaacttgatacaagctagtgtcatttgggaagaggtgatttgaattgagaaaatgtcacatccaaattgtcctgtggataaatctgtaggagtatttgattgtttgatgattggtgtgagaaggtaattttgggcagtgacacccttggtcaggtagacatgtgtactataagaaaagaggctaaaaatgtcaaagggaataagacaggaaacagcattcctccatggcctttctttcagtttctgccctgcttgagttgttgcctggaattccctcaatgatgggctattaactagaagcatacaatgaaataaactccttatcaagttattttggtcatggtgtttatcactgcaatggaacccctaactaatataatagcgaatataatagtaaaaactagttttacgatttatggagattccagaatgggagaagaagaggagaggagaggaggaaatgggggagcagaaatattgagttgggggaagaatagaggagagcaggatgagagacaccatattagagggagccattataggtccaaggaaagatctagcattagggagacttccagagatctacaaggatgacacaaactgacaatctaggcaatggtggagaggataacctaaacgcccttcccctaaaatgagattgatgactactttttatgccatcctagagtcctcatccagtggctgatggaagcagaggtaggcatccacagatatacactgaactgaactctggaacctcgttgtagagagggaggaatgaagattgaaggggtcagtaccaggttggagaaacccacagaaacagctggcctgaacaagggggaacacatcgatccgagatgctgtctgggaggccagtacaggactgatccagatccctgaacatggatgtcaatgaggaggcctctgcactctaggaggcccctggtagtggattagtattttttccctggtgtaagaacggactttgagagcccatcccatgtgaagagatgcactctcactctgggggagggcctaggcccggcccaggatgatgtgctggactttggggagcccccatcaagggccctaccctgtctggggagtggagggtggatggagtggggggtagtcaggaggaagggggagagatgggggatgggggagagggagaagggattgacatgtgaaacaagcttgttcctaatttgaacgaataaaaaaagatttatggagattggcaaaaaggtcaacaatgtattttcatggaaaaatgaaaggagaacatttaaagacttaaaaattaattttcaggaaacaccagttgagtgggtaatgggttgctggggaaaacaactaaattctgctttgaagaggttaataaaattctgtgttatgggctgagcatggttgaacatgtcttcaaatccagcaccctggaagcagagacagaggcaggaagtgttctgtgggtttgaagccaactcggtctatacacccacattctaagccatgaaacagctacacagtgacatatcatttcaaaagaatctctatgtgattctattttattactttctacagttaatttcaccactgttcttgtgtctgtacttgaaccaaccactttaagaaaaggccacaaaaccctgagaactcaccttactaagaatatcttctccttgtgcacacacattttgtacccggaccttatgtacagcaaagtcattctccaaagcttcatgcttctttagaaaactctgaatgaacaaatcagcaaagcccataatgttcaagaatggtcactctcaatccacatgcaagtctacagtatgttatttaacagatgtggcccagcccaactaataaactagatgagggtgcccttcctctgtaaaagctctatcaagttcctcttaaaaattctttcccatcaaacagggtaatcattggaaaaagtgagaggaatccagggatagtgtttctcagttcccacatagctctaaggattgctccctttttattttggaatcacacgattagggtaaaatatgaggatttctgaacacttagattcatgcaattctacaaacactccatctttggaaaaatattaagtattaagaaaattttaaactaagaactcttcctaaaggcaggagctaagaagaacattatgtcatcaaatcacatcccaaacctcctttgttaaaaactgatttctgggaagcatgaaatatgtgcagcttatatgatggaaagggaagtgagggtggagctggacagtacttccatcttcttatgaaattacatcgaaaatatttatgctagccctcaccacctttatcaccactgccaccatactctatctcttatcatatagacattttattaatacacattttcttacatagcatagtaacccaagctaattaaacaaacagaactttttataaatcctaatttgaaaataaatttcaacatatgaggtgcttatgcatcagaatagatgcttattccttctcaaataatatagggtacactatggtttctatatcacttctgaaaaaattgtaatgaagatttgaaaggaaattcatgttgcaagactgaatgctttagttatcctttaattgtatgtgtataccatgtatattactttaaataaagtccctttacctttttcacattctatggtatgtttagaaattcaaatataaatggaaagaaaagaaaattaatgccacacaaagagaaaggatctccaaaaataactgccaacaattagatgaaaataaaatgtacaccattgaatagatggatggattcctgggaatgtgaacctaccacgagtaagtcattaagaaatacacagtctgatcagtagtcagaaatcagaaaatttcagcacagcaaatcccagtaccagatggcttcactactaattcaaccaaacacttaaacaaatagtgccaaccatctctaaactgtcgaaaaactgaaaaaaaaggggacaattgccaatatcttttctgaggaaagccttatggctatcagagtcatatgaagacatcataataaaaggaagttacaggctaatgttcttgaagaatgaagaggctcttgctgtgttgaaattttctaatttctgatgactgaccatattttgtatttcttaatgacttactcctggtaggtttacatttccaggaatccatccatctatttgatgttatatattcttgatgacctgagatgcagactcctcaacagaatgcttgcaaactgaacatgttggggaactaaagactttacaggaggatgagtggaatttactccttagatgccagtatagatcagcatacacagattaacaaatgggatacattgcattgagagaagaaaagaaaaatcacatcagatctcaatcagatccaaaagagcacttggaaaaattcagcaatttttccagtataaaaattcttgacaaaattgaaacagtatattacctcaacacaataaattctacatatgaaaagcacacagttaatagtttaccaaatagttttttaaaattaaaacttcccctttaagatcaggaacaagataaaaatatgtacttgtgacattttatccaatataactctgggagtactagccaatacaattaattggtaaaaggaaataagatggtctaaataagaagtgaataagtaaaatagtctgtttgagaaatcaaaggatttaaaaggtttaaagctctatatttcatagaaactgtgaaaccaatagatcctgatgtgaggtgtctttctctagaccgtgaatgtgttggtctcattggttgataaataaagttgctttgccctatgacaagacaggatagagccaggtgggaaatccaaggagagacacaagagagaaagggtggaatctgggaaacaccagccagttgttgaggaagcaagacatgtagaaaacgaggtaattccatggccattacttagattaatggaaatgggttagttcaaatgtaagagctagctggtaataagcctgggtcatcgactgaacatttataattaatattaagcctctgaatggttatttaggagagaaacatccatttacaaaatctaaaagaaaaaatttcagaatagaaggcaacttaaaacaccacatttctatatattaataatgaactatatgaaaaactaaaaactgtttttatataaatctcatagaaaacaaattcttgatcataaatttaaccaagagatttgaaaagatatacattgaaatttaggtaatactgatgtaagaaattataaacaatgcaagtaataaatcaacttcccacttttcatggattagaagaatgaaaattgtcaaatctgcatatcatatgaggagatctacagattcaacacaatccttatcaaaattcttcgaaaggttttatacagataagaaaatcaattataatattcaggtggaactagtaaagactatggtctctaatagtctcaaaaatataccacagacaaaggatagtctctttaataaatggtacttgaaatcctgtatttaaacttgcataagaaatagataagcttgttatcttaaacaatatttaaaaaacaagtcaaatatattaaagacttaaatataataatgaaaagtatccccccactcaagagaacacatacagggaaaatttcaagacagttgctttggcaatcattgcatgcatcttacatcaaaagcacagacacaaaaagagaagtaggactgcttcaaattccaaagctctgcacagccaacggaacaatcaacagagctcatgcaccacccacagaatgatgataaatacacaaaccatttatcttagagaggttaatttccaaaatatccaaggaactgctttaactcactaaataagtaagtagagaaatgtcgagaacattaaacaggaatgctcaatggtttgatttaaaaatagagagaagtttaagagttaagaatatcagtttgagggctggagagatgggttagccattaaaagctagactcacaaccaaaacagcaagaatagcagtttgaggtggaaagaattggtaatagctatagaagagaaatggagagcgggagctttgtgacggccatcttgaggatattcagtaaatgatacatagtgtctctgaattgattccaaagtgtgtaaatatttggttttcaaaaataagaggctctgatagtgcacagccagcctgtaagcacttgggaggctgagtgaagaagactgacgtgagtttgggccagccgctgatgcatggtaagtctttgtctcacaaaaccaaaacataataataattaataaagcttaagttttaaaagcagaagcctttgagagtattagatatggaacattaaaattctagagcttgcacaggacatgttacaaaagatatttttaactaaaatactggtaatctgagtcatttgcccttcagaatttatttttttttcctgcaaatctaagttttcttttatgacctcacatagaagtgattcagctccacacagagctcttagaaaagtctttgtacatgaaacagactcaaagtcatgagaaaattaccgttctgtgaagactttctccacagatgccaaaacctgcattaactaaagatcccacacaaaggttgttaatttctttattcaacaaacccaataaacataacttaaaatgatgcctccaaatgtggaactaggtctgttaataggcatgctaaaattcttcttttcttaaagttatgtattttggaaactgtaaccaatttcaggcaaatgagcattatttttttcagattaatggaacattgatacgtgagagaatctttagaagatatatatatgatatgtgatatatgtatgtattatgtatatatgtataacatatacctctaaagacttatacctatgaggcaaggtctatcatcatgatgtctatgatgtcttctatgcagacagatcacaggttaagttttgaattctgccttcattccccattttgctccatgacttagacaagtcagatcttgctttctcatatttaaaattaacagaagcattcacatttctctaacccagaacacaggctctaatttttacagatgaaaacaccacattcttaaggaaagatcaaaatgaaagagatgacacgatggacccatttttgccttttctttacctgagtagcagccagtgtgtctccagaatccccccggctggccatagcatccttttcactcagccaagcttcctcttcctctgcattctccatgaattgcagatactgaagagactcttccaactttgcccctctgtatcaatgtggttagcccaacaggagtaggaaagaacaggtaaactgtggagctacagcagagtggcataatcccaccccagaaaaccactggttctcaagacagtcgcagcttaatagggtaagaacgcaatctacatgtctactggtcagtggtgctgatcccctgtgactcagaagagactagtgctgtcagaccttattttgcaatagtattgaaactttgatgaatgaaggaaatcccacccaaataaaagtctcagggtcagagacactccttagtgatgcagaggctccctgtgtcaagcactgtcttttctctcatctgatgaaagtactgcaaatccagaaaagatccttgcttttgaaaatttttatttttaatttatgcatatgtgtgtttgtctgagtgctaactctgggctagtggtccaagatgctgtaacaaagcaggctgagaaatctattggaagcaagctatctctccattgcctctgcatcagctcctgtctccaggatcctgcactgtttgagttcctgcttttacttcccttagagatggaatgtgatgtggaactgtaagccaaaataaactctttctactccaagttgctttgctttatgatagcagtagaaatagtaaataagacagtatgaatgtctactatgtatatgttggtgactgtggagaccaggaggtgacattggatcccctggaactggaattacaggtggttgtcactcactgaattatgggtcctgggaactgaacttgggtttcctgtaagggcatcaagtgttcttaactgctgagctatctctccaactctggtaaattcctcctattccccagaaagaactgtctgcccacagccaccagaggacaggttcatgaaaaagcttggttcttgtgtgggaattaataaaatagattgggtctgtagaccatgttgagctgaaacataagcgtccttcaaacaccagtctaattgtccaaacacaggagcttcattgatttctattgtccaactcacctggtctcggccaactctttgagcttttcccaatgttgaacaaactgagccagccgctcctgaatctcctcttttccaacagcagccttgtctctcaggctctctgctgtatccagtacattctgaaaaaacacatattccacgttatgttatcccacaatctcctctcatttgggcataattcatgacaggggattttgtctttcctaatgtcagattttccatgtgctcctgggacttgaggtggccccggggtacttggaatatgaagaaagctatatcaatatcttccatgctaagcttttccaaatattttgacacactttccagaaacccagtagacttctccctttgttctgccatatgggttattcagtcacaaaggaactctgctgccagttcagtaccagagttatctttaccaggcatctcaacccacatgccggttgtcagtgactgtctatcagtgtcaaaattaatcattctaggaaagatctcagcatcctgtctggaaccttctattcagaggacacaaaatctggacaagagaagaattcccatgaactgaatgaggactatctatgtctgaacactgctcgtgcattttactgtattgatttatctaactatgatgtgaagaactgcttttaggtgatttatgtctctttagatctggcattccattcatacctggacagcaggttcatgtgccaccagctctccctctaggcgtttgtgttttttcagtaagttctgaacactctgaaggtccctcccatagtcttgggagctcactcgtaacaacttctccctgagacccaggaagaaaatggaaaaatcataggttagatatatctgagatcagtccagagcaatagctttctaagtgtgtgtgtgtgtgtgtgtgtgtgtgtgtgtgtgtgtgtgtgtgtgtgtgtgagagagagagagagagagagagagagagagagagagagagagagagagagagagagagattctgatgaactctgggactgaggtggctagtttgatgtcaatgtgacacgaactagagtcattgggaagatggaatctcagttgaggaaatgctcccacagccctggcctgtgggcaagtcttgggtggattttcttgcttgctgattaatgtaggaagttccggttctccatggactacaaggaacaagcagcacaccccatggtctctgctttcagctcctgccaccagttttctgacctgtttgagttcctgtcctgccttccttcagtgaaggaccatgctgttgaactgtaagttgaaatgaaccttttcctccccaagttgctttaggtcagagtgtttttatcaaagtaatagaaacccttactgatccaggaaccaacaccaaaaagacacgcactggaagagaatttcagaaaacttgatatatatcaacacgaattaaaataacatagcaatgcctattagtatgccacaacatatattaatatttcatttttaaaatcatgaaattatattactttcattgtttttgtatgttgatatcaataacaatatgtgggaatatagattagtggcagagaacttgccttgcttttaccaagtattgagcttgatctttatacaaactacgtgaaatgtttgaacaccaaaaggttatagcatattatgactactaaaaggtgtgacttgacaccttataaatcacacttccatctaatttgttacttgtaagaatccgaagattggcagatgagaaacacaaggaacaaagtaactatgaagcaggtgaaagtgctgatttgttaaaaacttctcagccatatttcaaagaatggggtcagccataaaactatgacagatgatgtgactgcttagtgtcatgtattatgtaacaagtatagaaagaatggctggagagctggctcagtggttaagggtatttgttgctcttgcagagaacaagttcctaactccacatgaggaggctcaacaagcacctgtaactctcgctctaggggtcctgtgttttcttggtctccatgggcatgttcctttaagtacacatacacacagacctattcatgtgcacataaataaaaataaataaatcttaaaaggaaataaaaatggcaatgttgtcatcttttgtataagctgcaatggctcagctatccatgccccacagttcaatgcactatttaaaatgattgtgttgggtgtctgaattttattcccaggatgtgggtgaactgctcttcctatctccctctgcactggatttcctgccagcgtccactgaaggtgaaaagtgaaaccaatttttacttttagttgaggcagaggtttaaatgtattatcaatgtacaaatcaattacaaattgacttcagagtgaattggatcctttgggtgtgttacccagggaggtggtgatacatactctatccaggcttcctcatcatccaggtcctggaagaactggaacaaggcataggtctctttcagtttctcatggtgtgcagctgccaagctctggacattcttgtagcgctcgttgacaccattcattttctcttctatctggtcaatgttgaaagtcccactggagatcagctccttagccagattgttcagatcttttagagggtcctagaaaaatccaacatgcttagtgaatgaaggaatatggcattgtatggatcctatacttcagtccacatggttctactcccttgaccaggtgcaatagatggcttttgaagacactgaccttgatatacatgactaagtgtttcacacaaatattgttgggtaagaggtgcatcagcaatatagataccatggctatattactccagattacatttatttctagccaatctatctctccttctatgttttctcttgcactcactgactggaataataactttccccacacacaactgtcttcacagtgctgcacttgatagtctctaaccaacccatcatactgttcaacagtgtcctcttttgtagtattcttagaatggcaatacaacacatccaaggcctgtcatgctttcgttcattctagtgtagcccaataattatggaatgagaaatattacaaagttctgacacaccaaaaccagaacacttttggctttttgaccttttaatgtgtatctttattactaaataaaacatataattatctgtatgtaattgattgttaatactgtcagaatgttgttactggcccaggttaggctacaattggaatccttcacagagcttacatatgtccttacttatgtgttatgcattctctcatctggttttatttctttactttcctttatgatgccaacttctctattctttcaaagactagctcaaatttgtattttcagaaagtagtatgtttatgcatcagtaaaataataaataagatgactttcaggatctacttcccagagtcttagagcctatgctccaggggcttcagtagtaattgataatgactgtcacaatgccattgtagctcatggatttgacctggctaatatggcagcaggtcaatgacctcaaggctgcagtctcaagtactctcctaaaatagagtgtcaggaatatttccacccagaggagtgagattccaccacttcttacctctcgagccaacatctctgcttccaatagctgatgcttcttaagtaggtttcctgctgaagttaagtccctggcctgatctttcatggccaacaagccttctgcctgggaacagagaaaagggaagggcagattctaggtaagaactgaatttaaggaaagtaagattgagcatctacatttccagatatttaccatgaagggtcaaggaaacaattcgcatacacattaaattaattaacaagtatctattaagttttaatcttcacatcattcttagatatagttacctctgaaagccagaactcaaagtcccggatgcttgtgttgaacctttgctggcgactggcctcattgagtttctgccctttgtcagttgttttctctaggaggtaatcccatttttcctttagcttgtccagttgctcctagttccgggaaagtgagaattcattatagtctttggaatcctgggcccttgaagggataatgtggggaaggtctggctataagtgaagtggtgatacttgtatatcgtccatttcaaactagttatgctgtacctgggaaacagcggatgtgaggtgaaaggcaatgtttgagaatcagggtgctgagcttcattcagtgactggtgtttcaatgccaaaaggttcttggcagaaaagaaaaaaacaccaaacaggcatggttaagccagaagcctagttataattccaggaagtgtgattgtatttctatttctacccagcaaacactgaaaagagtggaggacttttcttcacatgcctctggagactaaactgatctacacacaaactttaccttcatggtttcttcattaccatcacatactcttcgctcaatcagagaattcccaagattgatgaccccgtccacctgctctgcacgaccattgacttcattttcaaaggcctgatgtttcagatatttcctctgaaggcaaaggaaagaaactacatcagttgattatctagagaagcattattagcacctcatcaagagaaccatgattggaccaagggaacaaaacaaccactgtgtctgcccccaaacaacaacaacacaacaacaaaactcaaccgaccacgataggacatgttcagtattagggtgaccattcaatcaacagtaagaatggtgaaatttttcaagagttctattttgaacttgcctgaatgttagtagggtctttgtaagattcatcgcaggctgtgggcagcatctcattgatccattcctctatatcctcgtagtcacgatagaactgtttcaggtcagcatagttcccaagctttcccagttcagcaagcagctgttctttgagagctttccatctaaaggatgaggtcagatcattttctactcagtgctcctttgctctgatgctacatatataacattttccatattcttttctgaccctttgcttttcatagactgtcactttttctggcatacaacatagtgcttcagtaaagtaactatgaagtatctttcatgcctttcattccgtaagtctagaacaagaggtctcctaagaaatacatatcaaaagggcaagaatataaaggtatctctttatcatgatgctgatgcagacagggacttgcaggcctgacctgtctagcacacgttggagccgagcagcaatctcttccttggcatagtgctcatcatctatgagcctcgtggcaacatgctctaggtcagcaatcttcccttcctggataaaagaaaatgaaagaacacagatgcctggtgattaggtatttgatataattccaggctccatcttaaagataaagtgtgtgtgtgtgtgtgtgtgtgtgtgtgtgtgtgtgtgtgtgtgtgtggtttcagatgacagtactagcatcaaaaagtaaatttcttgcacagagaaacatctctatgctgggatagtactaactccctatagaacaaacttttctcatggctattgtgaagatgaatcctacattgtataagatgctgaaatagagagtaacatgaagtcacatttagtcctaaaaactgtgttttataataatagaggccttattgtgagaaagccaaatgtccatatgtaatatgtcaacctccccttcctgctccatcattgcctgtaagaagcaaaggtgacctagggattaatagtctatggcttctgagaataatgccatctgcccacatagggcacacccattcaaactatttcattttgtgttttgattagtttatcaagtatcaagttttcctgtgactgttttatacatatttagttttggttgacccttatccccatccctttctctcccccatgtccctatgccttctccacgtctttaaggcttcccaccccagtattcctgcttcgctttcacacaacatgcggtctgcaggtgcctaaggaatcttccttcctctctgatagacacctttctacttttccagctctacacatgttcactcccaggcaaatgcacacggacaaaagttagaagctagggtcctcatgtgagaaaggacatctgtgtttgtcttagggctgatagggccccacccccctccctgaggatttgtggacagttatgtgggtgaaggagaggtatctgcttctggagtgtagtcactggtgaggggctcttcttcctgtaaacaaacttacaccatattccaggaaacaacctcatgaaggtcacaacccattaaaaaaaaaagtatagaagtagaattaattgggctggtagagaggcagaggatgtcgagtgcaggagtgggtggaggacaaggacaggcgacaaaactctgtgtgcatgcatggaagtatcataaggaaagccactgccatacataattagcctactaataaaacaatgcttaaagagaagcaaacacaaattaaaatgccttaaagtcagtaaactaggcaaggctatagagtatctgttattattactaatagtttgccatggtcccaccacagcctgggttccctgagactgactggaaaggggtatcagcaaaaggagaattgcgtctgaccaccagatggatttcgcacaaatgactggctccgaatagctcaagccttgtttattattacttcaaaaacaaacatgtttttcccacccaccaggattaacctctggtaaaaacaaatgtcacccccccccaacttttacatcaaaataattttaaactaaaaacaatgctcagtattttgttagcttagctaactattgagccaggcatatcctgtccttacaaagcaaaaatagacatgcattctccagaacaacaatatcactcaaatcttaatgaagcatatttatagaaatgggcatgattggccataaactgcttgcatacagttagcttgtatttctctgacctcttgtcctatgaaagggtcctgcatgcctaagcctataagaaacctgagaggaatcagaattttaggggggatatttgagaagaaagtggggtttctaggaatgatcatatctgtcccatgagtgactgacaaagtgaaactaaaaactgccaagagtatcatcaaccttatgacagagaagagagccttcaggccacgtggtcctagaagtattctgcactgtttggaggtctcctggtctttgccaagtgagagaccatctccaaaaggtttgcctcttagagacccattggacaatcatttatatgctgatctgaaattaggccatgtggctcctaacaatagttagtactgaaatttttgtattgattattacctgggcagcgattgctttctccaaatcatcccgtttcttcatcaaagcttgcagactgttcaagtgatccctgtcgtctgacctcagggagttctctcgagccaccatccaactctcaacctgttcacagttccctcggaacaactgtggggcggagtaggggaaaccaaaggcatggatatggttattctacaagggctaaggaaataattttgtccctcctcagtggtgatgacacaaagcatctttgcagggctggtgttctctcatgaagcaatcttttaattaaatcttaaatatactgtcactttactttttacttcaaacacaccttacatgttttataagctgcagtaaatgtagtaaatgtgaggtttctgtctcatgtggtacgtatagtagctaccgactggctatctctcctttctctctgccccctctcttaaaattcaagacagtctcttaggtagtctaggatgacatcaaattcagtatgcagtagaagttaagcatgaaatactgatctacgttctgagattttcaattcatctggccttcagctggttacttcttcacaacgtggtcaaatattacccacagatgtgtctcatagttccatatacttcactcattgtgatcacaccttcctttttatcctcaaagcatccatacattctatcttactagtaaacatctcctatattagaatgatctgtgcttcttatataaagaaacacactgtgatgatctttgtagtactaggacctggacatagcagttcttaatgaaaaccagtccttcagttaattacctaatggtaattgatgataatcatcccattcatgtacaagactgattaccatcttcttttactctctccttaaaaatgcttttaattttcaaaattttatatatttattattgttagtagtagtagtagcacgtctgtgtgtgcatgtatgagagagggtatgggggggattccatggtgtgcatgtgaaagccagtggacaacttactggagtcagctcttccctctacatgtgttttggaatgcaactcaggtcattaggcttgttcagcaaatacctttacccactgagccatttcgtaggtacttgtttgtctcttttaacaggaacaagaacatagaacataaggatgcttagtttacaacagagtacagtgggaaacaatcaagagacactggtgtttacagctcatagagtctaaagcagtgagtgcccccaatcagcctataaacccactctccaggacctggggctaaattgcaactatccagaagatgctatacctgaagttctaagcactggtctagcatcttcttgcggttttcccaacccttctccaactcgtctctctttattttaatatcatgaagagtattttcaatttcaaagctgttacggtggcctctgtctataagttctgtgccaaaatcctctaaggcctggaaggtggggtcctctgctttcatgtcatcatgatgttcctgtgggaaaagtaggaaaggtgattgtgactactgcaggaacttctgaagtgacaagagaggtttacatcagtggttagtagctgtacctggtgtcgctccagcaggatctctgtgccagttaagtcctcagccagctcaggtgatgatattatgccaccaatggctttgatccaattctctagatcactgtagaagtaaatgtattagaatcaatcatggctatcttaattcttctctgcccccatcagaaagaaaacccatgctccaaactcgtctcctggcaacacctagtgtttatatgtgctttatagaagctttcttagttggcctatttacatcacattccattgagcaacagtattttcgggcttgaagcattaaacctgctttacttttttccctattctgtgcctcccaggagatgacacttggacatagtctgcataacccagcaatgaataacacgtgtacccaggctattcctagggactctgcacagggcagtgtgtagaaacttcccatcctgcctggtgaatgtcagccttttgagctgtacctggccttgctgaggaagaggaagaatttgtgggcctcattcagactctccttcctgtcatttgtaagatcttgtagggtagcccaggcctcgttcagctctgttttcttcttctgcaggtcctcagtggcatccgggtgggactcacagagacgatcagctgtctcccccaatgtggtcacctggacaaagagaagccttctgataaccacatggtagtttctgaactggacaaaattacctttgctgtttttgtttgtttgtttgttttaagaagttatagggaagatgggacgagtgaccctactcctcagtggtacatcaatcctggaacccgctgggtcttaattcttcatatgaagacattctttgtgccctgtatgatgatgcttagctgtaggtttcttccagcatatctggaaagttttagtcttccctttttggctttgagataggaatagtcttattaattactgactgagggaacacttcccaatatctagaaatagtctgaccctactggatgtggatattcattttctcctccacatttgtttccacaatagaccaaaagtctaagtcacttggcattctcaaaagatgtaaagggatagaaagccttcattgagacagtaaaagttcagtattggtcatgggaacatgatattttaatgtctttttttcctgagagagagtgcacaaaaattagtatactgcaagatttagaaagagaataagaacaatggttttggcaagagaaccaaaggcacactgctacaggaataaacttgaagaaagcattgagaaaggttgaaaacatgtctcaccttttctcccagggggatgatgtctctctcaaagacctcatgctgcctctgaagggcctggacactgagcaggtcagagccagggtcagcagcagtaagagcccggcatttcttatcaatctgctccttgatgtcatctgcctctctggaacacaaaagagtgaagaatacaagagtaatgataagccttacaaggctggctcacaaagaagccgtgccctcatcgccttcagcacccttctcatccttgtgatatactggcatctaggctgcatggacatagagccatagatgctgtaattatttccatcctgtgtatcagcaaatagaagtttaaggatttctcaagatgatgtcactgccaaaaggtagagcccatgtttgaacctggtataccaactacagagttacatggttcaacaatacttttcctgcctttgcattgtaagtcattctaaacagaagaataaataaacagaaaaggtagaggtatgagatctgttgccatttactttcctttttatatatttttctttttgtttattcttctcccatactatacatcctgaacacagctttcctgcatccctccatccctcctccctttttgctcaagatctacttctccaccatttcccttcaaaaatgatcaggcctcccagagatagcaagcactcttaatctactcctgcagccttttaaatgcttcattctcacatgcacatctatactgagaacataatgacctaagcccagtctatccttctctattatagaaccgtatctaaatttcaaattatgtgccatgactaattgaatattgaacttggttatattggttatattggggtgtccagtgtatcaggtgaggaaaatttgctggaaaaatctattctgttagtaaactgtctcttttttgaggaagagggttgtacactatcatctcttctccatagtgacttgacttaagagccctgtgacatggctgtagcggagcagtaccatctaagtgttaagatgcttacctgtgaaacatctcaacagcatgggcactgcttagcagttgattctgttcatctgccagcctcttcaaggaatgccagcgggtgttcaactccttaaagaagtagacatatggatttagtcagcgagctagctcagacagcttagtattggcatgtcacctcctgtttttctggtagcccttcagaacgaacacagctctgcttctctcttgcatagttttaagaaagtgcctcagaggaagggttttcctttcttcccaactgatattatatgtaggactgtttgttctaggacaacattgtcacaaagggtccattacaacctccaaaaatgagttaaagtgttgacttggtagtcagatgttggcacatttattgaggccaataacagctttagagctagtagccttttaatgccgtacttgcttcctgtgggatataagcacagtgttttcatatatcttccttctatgtccaattccaagaaagctaccataagaaagaggaagtgaagtaatccttactgctttatgaaaaccaagatttgcaagtctggtctttgcaataaatgttcaccaaacccataatggacacaatgtggtctagatacaatgtggatgaagaacccccatttccatctctaaaaatgatgggagagacatttaaattctccttcattatgattatcaaaaccagtcttttccagtaaacttccttgaataaccttttcccacaatcaccgatctcttatgtgtactatctttgctttcttatgtctgagcactgaatttttaatgtgtagtaggcattaagaggtaggtgagtataggtcaattttaaaggatctcaggctagttaaattgcatatagtttacaacttcaacataaactatctaactttgggtaaggtcagaagataggaattttatgatccatttgatggaacatagcaatacaagttaaaaggaaatttaaagattatttcatcgagttccttacaaattaagcaatctttacaaagaacacatagacagagtaaagccaagactaaatacaactttcctgattcccagtgcaatatcttctaaacttcctttttcggtgtgtgtgtgtgtgtgtgtgtgtgtgtgtgtgtgtgtgtgtgtgtgcacgtgagtatacatgtgcatttgcaggccacaggttgatgtcaggtgtcttcttcaattactccccaattactttttttgagacaggatctctcactgaactcagatgtcatcaatttggctagacaagcaagctctgggagccttttgtgtccacccatgctctcctagtgttgggactaaaaccatgtttgttttttggtgcttggttgttaaattctgaggatccaaaattaggtcttcatgatttgttcaatacatcctttatcaatggaacatctttgtaatccctacacatcctaatactgcctcttgaagctaaatatgaatttattgtctgagaattttttgtcctccacactccaaaagttatgtgtgagaacacagaagacatttggaaaatgtcactaagtaaatcggctttactgaagttctctgaaacaataaaaatggctggccttttctacagtctcacactgcccttgccttctggtctttagaatgaatatgaagttgaatcaaccaatgtaaaccgaggacctcagagccaagcctgtcgttaaggaggaatggagggagactgcgattacctggcgtatgtgagcaccttctggtgttagaagatcttcaaacagcagttcatctgccaccttgttgatatcctttagccgaggctcattgctcttcagatcctagacaagaacattcatccaaagtactacaaatctttttctttgaccttccgtacatgcctgtcatctaggcccacatttagttaagtgttactaaattaaatggttactatcagttatcatacatatattgctctcaaatttgtcactgcactgtgtccttaaacactgtgacaccaaacaaccaaccaaaacttgccagaactatcatttacttggaatcagaagtgtatctctttatctcaaattccttaaattattttccatgtgttaatttatattatcaaaacattttctacctcaagtatatgtctacatgccaatatatatgtttatctccacaaggagaataacaaaaggaaaagagagtaagaagcagatttataccttgtgttatttgagatatagaattaatatgagtgaagaaaaaattgatgagcgggttctcaggaggtaaatagtaattttctggccgtgaaaacaggtcacgtctcttccaacctcaactgatgcttcatattttgagtccacatgagtcctgtgacaccccatcatcatttaacaaatatgaaacaaacacatccaaaatagacatctaagcaatccccttgcttaccctctgaaattcatcaaacttcttctgcagctcccagacatcatccagttctaccccagtgttctctgcctttttctcttggatccactccagcatgtctcccgcctcataggccagcagaaattcattgtaacgttgcagcaggcgacgtcttcgttcctctgctcgatccaggagggagtggtaccttcgtggaggaataaagaagaaggtaatataatgggtggaaaaacattgaaagcataacagattagggcgagggtgagaaaactagaggaggaaatggagggaaaggaaaagaagaataaattaaaatgagatcagtaaaaaaaagaagagaaatttaatggaaataaaacagacattaagagcagatggatgaataatattatatttaaacatttaagtgtctcctgcacccaatgctcagggaacatcctggaagagacagcagaaagattgtaagaaccagaggatggggaagccttctcgaaataatatcttctagaaatagcttcccaaaccagacctgaacaataacactatcgattgacatgctaacacagaagggaaaaaaatctcagagtcacaccctaagacaaagaactacagcaactcatgacagctcagagagggaggattaattagccttgtccagggaaaagcctcttcattggctatccagtataaaatggtcatccatgaaatcatacacacactgcaaaatatatctagcaggttttacttacatgttttcacatctacctgttatctatatagctataatcaaagaaaaataggacatcagtttgaaaaagacagataggaggacatggagaagttagaggggaaagggcatgaaattgtgtaattacattttaattaaatatctttaaagtatcagtggatgaagaaaatgtcttttgtcatcactttcttgttatagaagagagaagttgtacatggcagctagatatgaaagagtatataacattcttatgaatgtccccggacttagaaggaagctggttgaggagctgacacagacaattaactcctaggatttcctttcttcatatataaactaaagtgtgtgaaggataaaacttgtgaatttacatctctaaactgaaagttataggactatgagaggaaagctgggaataacagccaatgctccccaaagcctccatcccaggaacttacaggctctctacctgctgctggcgctgggggatgttgattggctcttctcgtcgatgttgcggaaaccctggtagttcatctggggccagtttcctgacatagaccgctggcacaaagccctggtgatcatcagcttcaaccttccaccagtcctaaagggaggacagattcacactccttccttaattcttcgaaaaatcacaaaccatagaggcttcaattctcacaacagtacccaggaacaggaacagctggctgataaggactaagcatcactcataggtggtacataatttccccgcattacagaaagggccgaggaggagttgcaggaattgcagaggtcagcccctggaatcaatgactctgatatctgatgccagatgggcatggtgctgaaaagcaagtgaggggccacgtggctcctcaggaatcagcttgccttcttggtggtgggttctgtgtttgacagcagtgtgtaagaactgataactcacatcccacttccaaggcactaaaatatatcaatttctctgaaattcattaatgcaaactcttccagttctcgaagactagctgctccagagtccagtttcttagagaaaatgctgtgaaatgtgatacaggcaaagaggaggcagcacttcccttggattttctgataagaaaacatcttgcctctcaaaaacattcacttatctttaataatagtaacaaaaatcaaaattctgctcttttcttattatgatctttaggagagtagttatatacaaatatgtatgtatgtatgtgtgtgtgtatgtatgtgtgtatgtttttcaagacagggtttctctgtgtagctttggagcccatcctggcactcgctctagagaccaggctggcctcgaactcatagatatcaggctgcctctgcctcccaagtgctgggactaaagacatgcaccaccaacgcccggctaaaatattttttataaggaaaacatattgtaaaattccattcatcgttttaacactggctttataagcatataagaattcaagtcattggaatataagttccttccttccttccttccttccttccgtccttccttccttccttccttccttcctttttccttcttcctttcttcccacttaaatatgttatgtctctatgttgctcaggctgatttcaaactcttgtgctcaagagattcttgtgcctcagccttccaagtgcctgggaccaaggtgcccattgtctttcatcaggtttctcctaaccctaaagcaaggatatgggaagaaaaggacaatttaattctgtaaatacataaaaatataaggttgttcaacctttatatatcttcaagttaactccctaagattttttgattcactgtttcattcatgctaaaattaagattagaatgcaaaaacccaaagttatatagatctatctttctgctcttgcacagtacattaagaaaaatattacttaataaattatttaagaagaaaatattaaatgttgggcattaaaacaactatctgagtcaggcagtggtggcaccaacctctcatcccaggactttggaggcagaagcaggtagatctttgcgagtttgaggacagcctggtttagagagcaagttctagtacagtcaaaggttatgagagaaaccttgtcttgaaaaaacaaacaaaccatcccgctacaaaaaaacccaaccaaataaacaaacaagcaagcaaacaaactctacctatctggtaaagtcaggagagagctgtggaagacccatgttgtagatggtaagaaagttcaagaaaaatcaccttgttgatggaactgagcaaagtcaagacatcattcttcttcatgctgacctctctacggcttcgggcctcaaagtcatataaagctatgaccctagcttctagaccagcctcatccactggtgctgcctgctgttgctggggaaaaaacaaacaaaccagatgtcagttgctcactggaagtctttccctgtacagttcacagtggtgggcagttcccaggacctcccaggagaggatagatggaattctgatgtgactgctgggtctcacagtggtgattgtcagggatgctgcactactgaaacacctatcagagagcaggaagattgaaaaatacaaacatagtcaccagtacataggcattttatcagaagcatggaatatgccaggctactgctttttttagtgggaggggcaatatactactgctttttagtaggaaagacaatattctccatgcagattcaaaaggacacatacatccacactttagaaacctcctcgccacataataatcaaagcaccaaacatacagaataaagagaaaatattaagagcagcaaaggaaaaaggacaagtaacatataaaagcaaacccatcagaattatacctgacttttctatggaaactctgaaagccagagggtcctggacagatattctacctacactaagagaccatggatgccagcccacactactatacccagcaaagctttcaatcaatacagatggagaaaacaagatattccatgacaaaaccagatgcaaacaatatatatccaccaattcagccctacagaaagttctggaaggaaaactacaacccaaggaagttaactacaaacagaaaaatataggcaatagataatcccactttaccaacagccaaaaggaaaaatgacagatttcaccaccatcaccaaaaaaaaaaaaaaaaaaaaaaaaaaaaaaaaaaacaggaatgaacaatcaatggtcattaatatccatcaacattaatggtcttaactcccatataaaaagacacagattaacagaatggataagaagacaaaatccttccttctgctgcatacaagaaacacacctaaacttcaaagaaagacggtacctaagaattaaagattggggaaagattttccaatcaaatggacccaagaaataagtgggggtagcaatcctaaatccaacaaattggactttaaactaaaatcaatcaaaagagatgaaggaagtcacttcatactcatcacaggagaaatctatcaggatgaagtctcaattctgaacatttatgccccaaatacaaaggcatccacgtttgtaaaagaaacattactaaaactctaatcatacataaagctgcacacgattatagtgggagacttcaacaccccattctcaccactgggcaggaacaccagacagaaacttaacaaagaaacaaaggaactaatagaagttatggtgcaattgaacttaacagatacctatagaacattctatccaaatacaaaataatttaccttcttctcagcaccacatggaaccttctctaaaatcgaccacatacttggcaacatagcaaacctcaacaggtacaaaaaattgaaataaactcccgtatcttatcagaactccatgatttaaatttagaattcaacaacaaaatgaattacagaaaacctacaaactcatggaagttaagtaacacccaattgcacaattcctgggtcgaggaagaaataaaaaaagaaattaaatatttcctagaattcaatgagaatgtggacacaacatacccaaacctatgggacactatgaaagcagtgctaagaggaaagttcatagcactaagtgcccacatgaagaaacaggagaataatcacactagagaattaacacaactgaaagctttagaacacaaagaagccaatacatcccggaggaggagatgccaggaaataatcaaattgagggctgaaatcaataaaatggaaactaggagaacaatacaaagaatcaatataaagaagagttggttcttcgagaatatcaacaagatggacaaacctttatccaaacttaccaaacagcagacagtgaacatgcaaattaataaaatcaggaatgaaaagggggacaaaacaacagacacagaggaaatccagagaatcatcaggtcatactttgaaaacttatattcctcaaaatttgaaaatctaaaggaaatagacaattttctggacagatttcacttaccaaaattaaatcaagaacagataagcatcttaaatagacctataacccctaatgaaatagaagcagtcatcagaagtcttccaaccaaaaaaagcccagggccagatggcttcagtgcagaattctaccagaaattctcaacagagcaatctaaaatggctgaatgacacttaagaaagtgctcaacactcttagccatcagggaaatgcaaaacaaaacaactctgagataccatcttatgcctgtcagaatggccaaaatcataaacactaattctggagaggatgtggagaaaggcgaacacttctccactgctggtgggagtgccaacttgtacagccactttggaaatcagtatggtgactcctcaagaaaatgggaatcagtctaccacaagatccagcaattccactcttaggcatgtatcccaaaaaagcacattttttacaacaaggacatatgttcaacgctgttcatagcagcactctttgtaatagccagaacctggaagcaacctagatgcccctcaacggaagaatggatagagaaaatgtggtacatttacacaatggagtactactcagctgaaaaaaaaaaaaaaaagcaaaccaatggaatcttgaaattttcaggaaaatggatggaactccccatcacaaaaagacaaacacggtatgtaatcacttatatgcggattttagacacagagtaaaggattatcagccttcaatcctcattgccagagaaactagtaaacaaggaggatcctaagagagacaaacatggtcccctggagaaggggaaagggtcaagatcccctgagcaaattgggagcacgggaagaagggagagggagctatgagaatgagacaggtagaagaggagggatgcagaggacataagggagcagaaaagttgagtcaggcgaagaatagaagataacaagaatggagataccataatagagggaaacattttatgtttacggagaaatcagacgctagggaaatgtctggagatctacaaagatgacaccagataacaatctaagcaacagaggagaggctaccttaaatgccctccctgataatgagattgatgactgacttatatgctacccgatagccctcatccagcagctggtggaagtagaagcagacacccacaactaatcactgaactgaactggaatctaattgtagagaaggacaagtgaagatcaaaggggtccagaccagactggtgaaacccacagaaacagctgacctgaacatcatgttactcttgctccccagactgatagctgggataccagcatgggactgatccagaccccaggaacacgggtttcagtgaggaaaccttggaaatctatgggacctgctgtagtagttcagtacatatccttagcataggtgtggactttgggagcccattccacatagaggaataatccttgagccaaaaaacacgggggcgggcctaggccctatcccaaaggacacgatagactctgatgacaccctatggaaggcctcaccatccagggggcaaagaaaggatatgtgaaaggtagggttttagttggggggtggtggtaggggaggatggaagggagaagggaactgggattgtcatgtaaaacaatcttgtttctaattcaaataaaaaaatctgagaaaaacaaagaaatcactgttcctgggtacactttctactttaatttctgttaagtattttgtctcccaagcatgctctcttcagggtggtgttgaaggtaaatcgtcccttgtggattctcttatttaatgcccctcacgtcttgcatttcctgatgccatatgatgcatcgatgtgtctgtctgtgtccagccacccactgggtacagcctggtacaggggcaagcaggaatgctgtgcatccgtgttgatattctactgtggttccattttcattttctgcttatgcatttaaaaaggtttatagccccttaacaaactaacttcctaatatgattattttaatcaaaacccaaatctctatttttaataaaccttatgttcaaacaaaagccgggtcacaaagcaaggggattaggaggataaaaatgaaaatgtggatggaagagataaaatggagcaaaagagaaagcctaaatgtatattaccaaacctagtgcttattgaaaatttttttggcaaacatctttatagatgctacaaagaggttagaattcttacctaaaataattacagaactcatattttctttgcagttctttcctggtttgttaaatcggtgtgtgtgtggggggggtgtgagccagcaacagcattcctttacacctatagtgagggatgtgagtactgtcagaacacagcacttctcacctggcaggcttcagcttgatccctcagagccttgatgctgttcccaaatgcattgagatccaccaggaaggcctcgtgcttcttgagaagagcctgcatttagtgatggaaagataattagggcaaatatcagaatgccagggaggtgcttcagcgactgccattaatggattatgtgatcgagttcagttgcttacttttatattagaaaattccttttcatatcacatttgcatgactcatggacatttcagtaaacaagtgaataacaatttcaatgtgtttgtggacatcaaaattaactaagatttacacacattttaaccaagatatatcacagctgtgagtggatgtgactgttgaaaacactatggataatcttactttgtaggatttatttattttattttagtttttttgatacaggatttctctatgtaactttggacatcctggactcaccttgtaggccagcctggcctcgaactcacagagatctgcctgcctctgcttcccaagttctgagattaaaggggtgctctaccaccaccaggctttcagaaaaacttgaaagacacactatttctaaggctaatgaaatctactttatagatatgttgatttccatacaacactgaacaaaacatattggtgggtgtaagagggattgaaagtaatttacgatccttaaggttcctcctgtctgtcttatttcatttgaataaaggaattcagatgctcattttaaaggcatggttagcctgtagaagttcagggtgactctgaaaagttcagaatagggccgggacaggtgtagatctttgatcactgactttggatttaggcactctttgtaggatctatgggtttctatgagattagaaaaaatgtcatattcctttaggatctctgttaactttgtgcatatcacagcagatccaggcaaaaagaaaaaaaaaatcactgctaaaattttaggtagtctagaatttgatagaatttggtgactattcactggaccatggtcattccatcccaccttaccccagatgcttcttcatcagctccatagtttttgttgtctacgattggttctttctctttaatccatgcttctgcttcatgtagatctgccaggtattgttggagctggacattggccttgagatcattctcccgtctaacagctcgagcatggagagactccatatttttgttcaagctctcaaccctagatgctatgtcttctgcagcaaagtgtcctgtggaacagatataggcatagtgagtatgaccctcgttcatagctgtcatgttctaattctcatcaagctttggaggaaaagaagaggcaagaagatgatgctcaatttagtgaggattacaatagaatttctgggagttggattatcttaagtgagattaagcagtaataggtagggggtagatgtaggtatgtgatggagagtgagttggtataagctaaggaatacagacacaacaacaaacacccaggagtgccgtaagactcagaggttgcaaaccttttcttctctagattcaacatgactagcagatctccatcctcccttaaaagtagaaaacaggttgatatggaaagtataatgattttcagagaattaatgaaaggaaaagaaaatatgagagatgccctaatgttattgtaacttatgccctgtatagtttggaggttctatgctaggaaactaatccaatctaaacctgagttgatgagatagagaataggaaattcaagaactagaacttgtgagacagagaactcaagagatagggacttcacagaactgaggcttcaagtacattcagtgaggccccttaggatatctggtaattcatgtgtatacatgcaaagagatgatgagaaatggtatgaaggcagctaccatacagtccttaggatccatcagaatctgcagatagtttaaaactacaacccaataaactgaaagggtaccatcaacacaaagtagggttataagaaaaacatctcagtactagacttatctttcaagtcatccagtgatacagtctgtctgaaggatcataatgaagacccaagaagccctttggctgtcatactgaagaaacaaatatgagtgataaaggggaaaggtaaaggagcctggaaaagaagattcatggcagaaagtggatgacatcagacttcagatcagaaaccacatctctgagagcaacatacttgcatctttaagctactgtaataggcaatgaaaatacacttgaaaaaaatgaatggaaaataaactaagacattcacttgaacagaaccaaagggatttatggttaactgatcatacaacaaaggacctccgaggaagttgttcattcagtaggaggaaagcagagcagacggtaatcctgaccagtgcaaaggagcaggaatagcaaaagaggtcaatacatggagataactttcttctttctcaatattattcaaagataattgaaaactgaagtcaaaacaatgttaaagcattgaaagagttataatgtaacaaaattaaattgtgtaacagcagaaaaagagggaaaatggaagagtgaactaaaggatgtttgattacacacaaaatgctatactatctgaggctaaaatgtcataaattaaaatgtgttttaattcctagaataatagctcccaatgctttgctctcagaatatctataaaaatttaaacaatgtggaatacccccattaagttgccatacatatgaatatatttatcaatagtgcccatataagaagttaaacataaaactttgaggcaaaaactaataaaaaacaaacaaaataattacattaaaaacattgagtaaatttcagaaaagagaacatttctgggaacagaaaggatatttcatcttgtagaaattacaattgatcagaaagacaaatatatcagctatatttgcttataataataaattttcaaaacatataacaaaaattgatgagtatataataagaaatagaaaaatattaacacctatagtcagagatttagagaaacaaaaaatacattctatggcaagataaaattcaaaaacaaaagattaaacaacaacaaaaaaggaaaataaatttcattggtttgaataaaaattcagaactaaaaatttctcagcaaaatttatttcaatgtatacttttaactggatactaataagtgacttgttaacagagggaaaatattttagtgtaacctggatttcttggccacacttggcatatgatgttcaaatctgaacatcttacttagagagtatagctttctaagtatgggcgccaagtgtgtgcatagtcactaaactttcatgaaatgataaatttgaaggcatggcctttgtattactttcatataatgtgtcccgagaagcaaagcttttagatatttggaagccctcacatagggaaaagccttgtgttttacaaagctttgcaacttagatttgaattctgcaacttctccaaagaagcacattcattattagactaaaattgatttattttaatgatttcagatttgcaataaatagagatgatttaataatgcattcaaacatcttctacagcaggattattaaaaaaacacaatgtatactgctctaacagaaacactcaaagggaatatcttcattaaattgaaaagtgatgccatctacttttaaattcactttaagtactaagattatctaaatttctttcccaaggtctgtcatgatggagttttggcaaaatcaatcagtgtcacacgtaccttcctctaccattttgtttccccgctctgttatcacttgaatacgtggctcatggctggcaatgtctgccaagatgacttcatgtctgttcagaagattcttggctgcaaccaagtcctttcctacatagaaaaaaaatataaggcttgatattatccttgtaagtgggacttgcttgtgaaacatgtttcacctgtggcccaatattagtatcacctaaatatgaccactgaaaatttcatctgtcttcaccctccctctatcctcagcatgcttaacctctctaatttccagacttttttctctgtacttagcactacagcatctctccagacactctccacgcaatttcaacagaattgatattttttatgaaggttttgcagacataaccctctatggactttcatagatgctcccagtacatctgcataaagttgtacaatatttgtgtgtgctttttatgtccatcaaagcaactatcctggaagttacacttatgaatgaatgagttctaaagtgtatatctacagttcactttaaaatctttgtggtaggtcatagagttctcagaggatcatcaataactcagacaaatacatttgatgcatccagcattagccatttcttctcagtaaagaagtttcatttaaaaaaaatagcagctcaatcttcagaaaaccaagcatgccagatattcccccgaggcctgaattcatgccattgcttatttttctcttacaagttgaatctgttggtctaaaatttaaatattaaactttgatggaggtctgaataacatttcatcagtctggtatggaagagctaagagtaaacttttatcccctcactgttgtatcttgttctttcagtctggagaacttggacctttcctgactgctcagtctgattgtgctgcactgaccgagatgggtggaagttgctgagggttcagtctcctgtatccaggcctcctcatcttctgagtccctgcaaatctgctgtaacttgagtaagtcaatgagcttcttcttcctagtggccagtgggtctttcagagcttcatagcgggaaaccaaggattcctgccttgcacgtatgtccccagagtcaggatggcctatttcttcaaaatgtgcagccatgtctgtgagggtgtccacttgattctgatggagaaaaacaatgtgtgtcaggaagttatataatttattaagaatggatgacattttcatgtgctgaaaagtggaggccctatcactttaatttttcctgtgatgctagggttttaatatttttcaaaatattaagattggtacaggaaactgcttcctgaacattacacccatagcacagacactgagatccacaattaataaatgggaccttctgaaactgagacgcttctgtaaggcaaaggaacagtcaacaagacaaaacggcagcccacagaatgggaaaagatattcaccaaccctacagctgacagagggctgatctccaaaattacaaggaattcaagaagctagattccaaaacaccaatcaatgaaattaaaaagtggggtacagaactaaatagagaattctcaaaggaggaatataaaatggctgaaagacacataagaaaatgctcaacatctttaacctcagggaaacgcaaatcaaaacaactctgagataccatcttactcctgtcagaatggctaaaatcaaaaacaccaatgacagtttatgctggagaggatgtagagaaagaggaacactcctcccctgctggtgtgagtgccaacttgtacagctactttggaaatcagtatggcaattcctaaggaaaatgggaatcagtctaccacaagatccagcaattcaactcttaggcatatacccaaaagaagcacatttacacaacaaggacatctgttcaacaatgttcatagcagcattatttgtaatagccagaacctggaagcaacctagatgcccctcaattgaagaatgtatagagaaaatgtggtacatttacacaatggagtttttctcagtgggaaaaaacaacggaatcttgaaattcacaggaaaatggatggaactagaagaaaccattctgaatgaggtaacccagtcacaacaagacatacatggtatgtactcactcatatgtggattttagatatagagcaaaggtttaccagcctacagtccatactgtcagagaagctaggaaacaagggggcccctaagagagacatacatgtcccccagagaagaggaaagggacaagatctcctgagcaaattgggagcatgggggagggaagaaggagctaggaaattgaagaggagaagaaggggagtgagggggacatgagggagcaggaaggttgagtctgtgggaaaaatagaggagaacgaaataagagatatcatattagagggagccattatagatttaaaaagaaatcaggcactagggaaacatccaaagatctacaagaatgactccaactaacaatctaagcaacagtggagaggctaccttaaatgtcatcccctgataatgagattgatgactaacttatataccatcctatagccttcatcctggtggctggtggaagtagaagcagacacccacagctaaacattgaacagaaccagaacccagttgcagagagggaggagtgttgagcaaaggggtccagaccaggctggtgaaacccacagaaacaactgacctgaacaagggggagctcatggtccccagactgatagatgggaaatcagcataggactgatctggaccccatgaatgtgggtgtcagtgaggaggccttggaaatctatagggcctttggtagtagatcagtacttatccctagcataggaatggactttggaagcccattccacagagagggatactgtctcagtctagacatactggggagggcccaggccctatcccaaaggatatgacagactctgaagatccccctatggaaggcctcacccaccctggggagcagaaagggtattggataggtaggatgttagtggggggcaggggaggagaggaaggagagggaactgggattgacatgtaaaacaatcttgtttctaatttaaataaaaaattgagaaaaaattatggatgacattttcatgtgctgaaaagtggaggccctatcactttaattttccctgtgatgctagggttttaatatgttttcaaaaggattggtaagattgcaaggatgcagaatacgagaatgggaagctcttgtgttataggtgatagtattgatacagacaaatgtgaaatgggccacaagtgagcagatgaaatgcaaatggcaaggctgtctaaagaagtctaagactctagactgagagaatggtgtgctatttagaatagtcagtaggtgcttacattagccatcagcttccagggagacatgctcagtagaatgatgggacatgagagatagtgggaagaggcagttggccaactaaatctttgaaaaaatttcctttgatttcctaatcacttaataggaataataataattacagattgcaaatatgcacagagtatctgtccagttttctacaactagcataaagctaaaaccaaacctgacgagcagccacagctgactcaagaagtccatgtttcctgagtagattctgcacatcggccaggcctttcccataatcctcagaggtgacctgccactccacgtcctccagccagtgtttcaggtcttctgcattgttatcaaactgtagcagctggttagcttcatacagctcggtccctaggggaggagatcgggtagaagacacagagaattatggcttttctctatacactgtaatacctcagccctcaacttaatgaggaatatgtttggatattccaaagagaaaaataagggaactgtcttacatcctgttagagaagaagtcatcctaagttagaattctggtggtatttggttttacatacagagatgttatcaacacaccaacagtaagttaaattctctggtgaaatgcagttctacttattagttgtcaactgttttgggtattttcaagtgtcatttgctacatgttgtacagacccttctttggataagatccaagtccaaacctaacatttgctcaactttgggggctgggtaagtatgaaattctgaggtggttttgaatatggctagcattactactagtgactgtcttttattacaaaccatgtttcatttattttatcttctagaaataccttgatgattcccagtatatttggctacttctctattcaattaccttgtagctatttgcattagtattcttcaaaacaattaccgtctcctgctgtgaaaagtagccatggcatcttattattaaagtgacactgtatttgtttcattaagcctcaaattaggatgacatccaaagaaaccaatgtgacatctcctataccattttctatacccaggtcaaaatcctgtctacaaatgagagtcatgacaaagcagataccaacaacataccaacagagaaaacatcatttgtaaaaatactgaaaaatgtttaatttcctaatgtaagaggcaagataaaaaataagtgaagatatatattataaaacttataatagggtctggtaagtttctcatagacaaaaaagaagcattttctcaaccctacaagaacaaaatacataggaccattgggtgtgacaccaataatcttttcatttctaaactcttaatgtcaatttcaacacttcatattatgacccacttataaatctagtttatataaccaaacatgctaaaaaataactctagcatattaggtttagatacaaagccaatactgaattcatggctttcaatattccaacatttatttaagaaaagaaaaatctaggagaaaattgaaggaaaaaagaaagttccaatgacaacaacaaaactccaatgtaaataaaggaaatatttaaaggattaaatatataacatgatatatttagactagattttaagtgttgatgacaagatgacacaggaaagcaaatggctaggcttccattgcaaacaattcaccaaatatcaagatgatgaggacagaagcaatatattttagaataagaattgaattatcctttacccaaaactttgcttctaaccttttagtgctgttgcatccagcaactctttccagaggttggcaacctcattcatgcgagcggccacagcctcagaggcgtagtgaccatcctcaatcatctcctggccagttttctccaggttgttgagcataatcttattagccgccagttcctcttcaaagtctaattgcttctgaacccggctcttcaagttctgtacatcctgagagatggtgagaaaataaaggaaataattgcttgaagaaggaggaacagacattctgaggaaaaccagaactagatgatgagactctatagaaaaatcaaagtagaactgaactggaagattctctccaatttcactatctttcatagcaccagaaagtaccgatcaggctaatagagagaaggcatcagcagtcttactcagatatgaactcaactacacataacgctaacttgcaagataaacatacctactagtgaactagagtcagggctgccttggggtaaacgagtactctttgcttaaatgtgaagcttgttcacccaaagggaactcatatttgatgctggaaagctagtcaaaagcccgtggctgaagaggtttcagtccttagggataaacttattcctattgtaaattgtcatggtgtcaaactgccatatacatatattcataaacaaagttactcttagccttaatcaggaaagcatatctgtgcaataaatgatgctgaatgcagaggtagatgtttgctgaatgtgctgacaataaataaaggtggagagcttagccctaaactgcctgtaaggctcgggaccatctttaaagaaatggtagaaagagtataagaatgaaaggatagggagaagggatgtgaaatgctgggcatgacacagtcagtgccgtcattttctgccagcagatgtgactgattgcaatggggttgtattaggctgggcatatcaacaaccaaacacagatcagcagaacttatggggccttaccattcaatgcatcctatgggaagactgtttattgtcttcagttgttcatctacaaaggagttcactaggctccaatgcgtacatcacacagatgacccaggttaataaacaagtctctctctctctctctctctctctctctatatatatatatatatatatatatatatatatatatatcctccagcactaggtcatgaaaattatttcaataagactccatgcaagcatgagccatcaatcagaactgtagtgatgaatagaaatattttccatttctttttcagtacatataccacccacacatttgcattttagagctgtttactctgggtgcactagagctgttactcctctagaaaatgtaaccatgtgctttgtactttcacagagtgaaagataaagtaaaatgttcacaattatctaaagtatgaaccgaatatacattaatgaataaagcgtatatagaaatatagatatcatatacatatgtgtgaataatatatcatcacgaatgtgagtgaaagcatgcattgtcacaactctaatgaagagaaatcaatagctcaaagatttcccagcaactttgataatcacagaagctaaaagactacagggaaaaatttcaagcccaggttgccagagtccatatgctttcagtctctgcgggtaacatgctctaaataactagataatgttggacaccttccaattcagaagctggcttcttcactcatgaaataaaaaattgcttccttccagccataaggccgaggtagaaagtctacattacccaaaagcttcagttacttctgagcttactttagctttaaaataactaaatgtatcacttgaaccaggcacaatcttatcaattacaaaggtatataggaggaccagttatggtttcaacacacagctttgaattccagctgctcaggaggctgaggcaggaggattttgagtttgggaccttcttgggaatataacaagactctataaagtatcaccaatgagagaggtatgcatagacgcagaagctatactcgagggaccatgaacatccaaggaaggaacatccctgtcccccatcctgttaaggactctagaaggtgatctagttgagagaagagaaaggaatagggcatgagaaaaccagaatccagaccattgggttttatctaagtgtgtagccccagggagccatcacatttttcatgctgttttgttatctataaatgaagcctttggctccaaactacaatctatgaaaccagctgcccataagtataaacaaggttgaacaaatctccctaccttgtagtcttcatcatcagccaattttttcttcttattgatccaggtttttaggtcatctgagtcttgatacagttgttggagaagcagtgaatctaccagcaattttcggcgagtggcggctctttcacgcagagcatcacgcctggccaacagctgtaaagcacacacacacacacacacacacacacacacacgtcacacattgatatgtgagtaagctcacagccaacaaaagcaaatacatacacttgagattattgcccaccctatctttcccccagtgtttttcctgatctccgtgcccaggaaatgcattggctagtttggtcaatttgtgcaaacgagagtcatctgggaagtttaaacttcaagaattgcctccacaatactgacctgtgggcatatttgtgggaacattttcttgattaataattaatgggagaggaactgctccagcccactgtgagcagttcctcccatgtcaggtgatcttcagttgtataaataaacaagctgagcaagccatagagtgagtgagtgtagtgcattcctcaatggtctctgcttcaggtcctgcctccaggttcctaccttggcttccctttctaatgtattgcaacctaaacgccaaataaactctttcctccagcaagttgcttttactctacttcatcacagcaacagagaaagtcaggcagatagaggctctgggccttgggcataccccatcacgaatagtagcaatgttctcagagtcatagtggtcattgtcaataagcttggttgcagtttcatccaaggtctggaaaaaaaataacaatgcctttctcagcaagagctaaaggagtggctacagtttgagcatccctttaagataaagaatatcaatgtgtaagtccaacaatcatgaaggttagaaggcctggatcctagttgtgagttctgatatacctatacttcaaagtgaataccctaggcttgataattatcttttctgcactataattttttacagtctaggttatagtgcatgaattcaggcattgatatgagtaaacactgaagaagtactacccaggatagaaccaatctcattttcttaccggctcttctgtctatccaatccagtaatgtattatatgcatctttagctatgtgtctgtttatagctacactgggataagaagacaagaagtacagaagtaaatttttatctatattgattcatcaatcactccaattgttaaagatcagaatggatttattagttgggataggaaaattatataaagtatgtgataacacaattattctatactcaaatttttacctgtgggtatctgcaacacatatatgaattagtgaagtgcaaacttatgcatgttattaataggggaaattttagaattcaattcttgttttctatatatatatatatatatatatatatatatatatatatatatatagtgtatgtatagtgtatggccatgtatgcactaccctagaagacaattaaagatagacaatgtagttcatcatgctcttgaagtccttcttccatattgataaattttatgattgaaaatgaaagtatattataggcattctacatgctcacagaaccaaaccccagcattttaaggcatgtaagtaggtattatcaacaacaaagaaggggtggcaatttacaaggaatagtcctgatgttaggtattgtagtcacaatagggacttggtttagcggcaggtatggaaacagtgtatgtaaataggaaacacatgtccatccagaaccattacttactataatcttttcttcctgggcagtgaatgcttcttcgaagtcatcatgcttttgaagaagggcttctacactgcccactgagttccccaggtcctcattttccaggaaggcctgtaaaagatagaaagccatatctcagattttctcattggcaagaccctttcctcttggaacttctcagagacaaggataatggaggtagtctagggaactgaaaaacaaggtgagaaattgaatagacaaggatattatgtagaaattaacttcaaatatctcgagcttagattcccatcttttaatgcttgcatgcaactttcttacctttatctcttggcatagtcacatggaattctctccactaactaaatattatttagagttctcaaaattaccttcctttaagaagttgctcattaaccctgtatgacttataatgtttttctgcctgagaccgtacccatttgatactcattttacttttctttagccgttgtcaaaaatctctgtgctatatacttaaatgtagcttttaagacagtgtcactaggtagaacagactgttttcaaatttctggacctcctgtgaactcagcatcctgagtggtgggattgcaggtgtgcccactatgcccagcttgtacttaagtatttttctatgcatttgcacatgaagggaattgtagcagcacccttacagagctaacccatctttactttttgccatggatcatcctccagttcctgagacaactttgtactaaagaaatgactttgaggatgctaatagtagtcaaagacatagataaagaatggaagaagtgatatttgaagacaggtacggtgctttctgttacctcttgtctgctcatccaactatccacttgttcactgtctcggtagaagaggtgaaaatccaggcactgacggtactgatgctgacacttgtcccacagttcaagcagagcagcccagtcattggctagttttgtcatcttaagaaaggaagggacattgtatcaaaaaaaattaaccaataaattttatccttcacttactgagcagctaataaatgcattgccatttgaaaaaggcaaaagtgagtaagaaatgagctacttttctaaggtactaacaccttcaagcaaataagtgcagtataggaaaaataggataaatgccatgaagagacataatatgtttatatgcttaaaaaaagaaggaaagattaattcagccagggagagctagggaatgaaactacaaggattataaggactattgtatcaagaaatttacagttatcgagcagcatcagggatgaagaaaaaacatcaaaccacaagaaaattatattgtcaggaatatgagcactgaggttatattgcacttggggaggaatagagtggctaaaagaggtggatatttgatgatttcctcaccagtggtgaaaaatcaccttaatttgagattgtatggaggagagcataaacggtacaggtgcacatcactggactaggcattgtagggaacccaaatattatcaaggtaaattcagtaatgaatttaccttctagagttgggtgtgaagatgtgctaaaataaaacaatgatacaaggtggtataaaggtttcaaattaagtgtgactcagagaattgacgaagcgatgcccaaagcagagcaattgcaattgccgatcttgtggggattttaagtgactcagcttagttaatgcatacgtgataaggactaggtggactccagacacaccattaacatgttcaggtatctccttttccctttccaaagagagatttacaaaatagatgagggcggactatatcattgacacttcacacactgtgtgaaagtagcttaccttctcacgaatttcctcagaagcttcgtgattaccgtccagcagatcttgaccagtcgcatcggcagattgaaatctgtcatcatacgagtcgatctcatgctgtggtcacaaaacagaatgtcacaaatgcagcaagaaactgcttggacttctccatattgaatgaagtcccccatcctttctcctattagggaagcctttgtcccctaccttatgctgttggtgtctggctagtagtgcctccccgctggctacatctgtaggcagctcatcagcattgatcagagcagtcttctccttcatccagcccgagagctcatcatagtcagataagaaccgatggtatctatgggggaaaacaggataaaagacaggaaggggatacctgatttgaaaggactatgcatggcataagcaatagcaaggaaggttcaccttatcctaattccacgtctccccttcccctccagtgcagtaggtttgaagcctttctacacaggggcctagatcttagagtaggtgtatcattgtgtgtgtgtgttataattctgtcaccataatgtcacacgtacataagagtaaagtctcatgatgcggccagaaaatggatacatgccatgcaactatcagagaggagatagagttgtgttttctcaaaactatcgtagctagtatttactctactaatcaaaaatactcataagattattatctatttaaaaagttaaatattcattatttggttataaatcataatgatagctttggtactatcttctatctcttgatggttggattactatctctgagaattaactactaaaattatgacttgttatcacagatatttagaagttttaactgatagtcaagataccagtttttaccctttagcttaaaaccttgtttacaacttttgccaaagtctttccagttttataggctactttataacatcttacagctatgcagacaggaaagataaaggctgtggttgaggggcatgtatgatactgagtattctaccagtttgcaaaaggacttcttggacaaactaaaatatcatttgcctctagagagcaggcaggagaactgagaatccttttaagctttttctgctttgggactccctggaagaggtaggacaacatgtgcaatttctgacccataagaagccttcagctttgcatatcggttcgtggccaaggcacggatgtgttcccagttggagagcagatccactttcatctgctggatctgcgtggcatccgcaggatgggaagtcatcagcttgtctgctttggcacacaactccttcacctttggaataagaaagaaacctactaaaaaattcaggcaccgtcacccctggcagagctttatagaagagagaataataaaagcaatgacctgaatagtaatgattgataagtatatttatattacaatacttgactaataaaaatattctatgttaatgacaatttttaaaatccttattatccataatatgttttatactttacaagtattttctcatattatgttgttcatttgataatatcacaggaaatattcttttcttttctcttttttgataaattattcttatttctatgttgtatgagtgacaacagagaagtgctggttttttttttgttttttgttttttgttttttgtttttcgagacagggtttctctgtgtagctttggagcctattctggcacttgatctggagaccaggctgacttcaaactcacagagatccacctgcctctacttcctgagtcctgggattaaacgcgtgtgccaccagtgcccagtgagaagtgttgttttactctttcagtcatgctgctcacgtctgaagcaaggttcagaacaaggtttatccctcatcatctctctatgatatctctgtagatgttactgtctacagtcaggaaggacacttttatcccaaacctgaagaaaaccacttaaccctttagctctggagatccgggatactatagtaaaatatagcacaggtgactttttacatgccattattatttctttaattattcttaaacacaatcagatactgttgagagtttgaggtattgttaccattacacattgtgtcctataatttcagcatttattgttagggcaaaatagaccaaccacaaagcaagaaatgaacaacaatggaagtgggaaggtggatgtggtccaagggacagggctttattcaaagcaggcaggtatgatctttctgtactctgcctctttgttgaaaacgtatgggtgtctgccctaactgtaactgaagttgtaaaatggaatattatgtaagttttgattaccaacaagattgggttaataaatgcctaatatagtaaagcacctctctgggtgtttgtgagagtggtgtgtttctagagacaactagagctctaactagtcagtgaatcaatctcttgatgggtttatgatctggtattgtgtgtgtgtgtctggggtgggtgtggtgggtgtggtgtggtggggtgatagaaggcaagaggttggcttgaaggaagcagattgatgaaggcatgttcttgggaattctatttaattctatgcctttcctgtattcttctctgtatttcttggttagtcatgaagtgaacagctgttctccaccactttttatcaacaagatgttcttccaaagcacacaaggctaacacatgatagactgaaacctctggaattgtgagccaaaataagtgcatctacccttagatagtttctgctggatactgtggccacagtggcagaaatattagtaacaaaggaagaaatgaaggacagaaattgtcccaggaatacaggcttgctctgagttctagtgtgcctgtgtctgttcttctaggcatataaatgagaggttttcatcttctagaagggagtgaacttgggcagatacccaaagaatgctcaatcacaccacaagaacatctgttcaactatgttcatagcagcaatatttgtaatagccagaacctggaaacaacctagatgaccctcaattgaagaatggataaagaaaatgtggtacatatacacagtggattgttactcagctggaaaaagcaatggcatcatgaaattttcaggcaaatggatgaaactagaaaaaatcattctgagtgaggtcctgccttaacttgatgttctaagggaggccttaccttttctgaggagtggatgggggtggggtggggagaagatggagggggagtgggaggaagggggggactgtggttggtatataaaatgaataaaaaattaaaaagaagggagtgaaaagatagatttggattttaaagtctctcagtttattatgaaagaagaaattccttccctgacttacagtatgaagggtgaaaaccagggtccaactgctacagaagagaatgtgttgagagggaaaacaaatagttgcaaagcgctttactgagggagattagtgaatcattcttggaggtattttgtttagttgcaacacatatcacaaaatatgatagcatatgaaacatatgtgtatgtttaaataaaagtagtttgaatataacataatgacttgcagtatcactgaatacatatgatctagaatgtggaggcatactgcagtgccacagaagaatccatccttggttaaaaagtgtgactttactgtgtcttcttgaggatggtgctaggcaggaaggtcaccacgtaacttttatgagtctaggaccagccatttctccagccagcaaaagcttaccttgtcatccatgacagcgagattcctttcaagccccttgtgattgtgaaacagtgcttccgaactaacaagatctttgccatagtcctcagaggtgagtagaggctctttctcctccatccactggatggcttcagtgacatccctgccagagagtatcatgaacaccaacaaaccaagatggcaggcaggcatgacagggcaaacagacctggaggaccagcttagttcccacaagtagcaactactctatttttcaacaaacaaccatgaagtaacttagaacatacttgcttgttttttcccagtgacatgttctagtccaggggatctattgatctgccggagacactacccgtgtctgacatgtgagaagttattcctgaataccactcattctttccctctgactcatctaattcctacatgtcctctttgctttgtaccaatacagcagttttatacttctttattgttcggataacataatcaaaacattggatatcaagttggtctttgctttcttaagtcatttgtatctcaaaggtgaagaaatgatggcctttggcttttgaggtactttgagtaatgccagcaggagtaggcagagggtaatacaaataaatctgatacatgcctatcaatagggcccaaggtcacactttttgaagtccttattcacctgcttccacttgtggaatggctagggttatagtctgtttgcctctaccgtcttagtttagatggtgatggggatcaaaggcagggattctgttgcagtagaccactgcccactgtgctataccatcagcatcataccttttgaatctttggaggtctgcagcattcgatagattttctcgtctcttcagagccaagttccagagacgatcccaggcagcatttacctcatcctgttttgcctttatctcaggcaacttaggatgtttattctaaaaaagtaaaccaacaaagatgacgccataccaaaaaaatcactttaacactgaatttatacatcacaccttgtcacactgccatatgaagaagcatggtttcataggcaacaggataccattgccatcacacacacacacacacacacacacacacacacacacacacacacacacacacacacagtaatttttatggatcagaagggggagtctgtgaccagaggttaaaagcggctcataacatgtcagtccatggaggtgcatctgtctactctcttacaatgtcacatttcctcatatcccaccatgattaagaccagaatcctttccctggaatgcccctttggcttccaccttacctgggcacactcatcagcatactggttcactttgtccacttttcccttccgagctgtcagttcttcttggaactcttcaaacttcttatggaggacttcagttcgttcccagtcatcacccaactctactaatgtcactatagcttcctgtaagtacagaaaagtccataaaatcaccagcagaaaaaaatctagaaattattttgcaggtcaaaagtcccaagcccctgttgatttctcaggataacacaaatggagacccttcctgagaaaagccggattaactcttgggatgacacattgatctggggatttgtcttttgggataattctttggtaagattagggcgattgttgggagagtgtctggaagttccttctatgttttagaagaccagtgaacagttcttcctactctgcctcctttggaatcaagcatttgccaaaagcacagctcatgtgtgtatgtgacttcagccccaactggggtactatgcactgagaaacaacagttgaaaattgtttcagccaagatccagagtgtaaggaaaacctttgcattggggagtcaacagcatggggagaaaagggtgatgagcatagatcatactgaaagtatgttaagtcttgtctttgccataatcacacctgtgtatttaggtttattccctacaacattaatcttcagaatttcctcaaatctttgctaaaattcacctttcccccaaagaatgaagtccagaaagagattcttcaactacccaagactacctgagtaagcaatagagagttactacggagtgctgagacagagccatcagagcacacacgagtatgttggcttgtaccttttctttgatccattccaagatgtcttcacagtcctgcgagtactgatagaacttcagtgcctgcagcagcacctcacttttctcttgggtcaactcccacagcagatcccacaggtggcgaagttccttcagatgggtctgtaagcaagagagcagaagagctggcctggcaaatagctcaatggggaaaagcctttgccttgcaagcccaacaaccagagtttgattcctgaaaaatatggtggaaggagagaaccctctgacatctctgcaagtatgccacattacgcagcatgaacacacacacacacacacacacacacacacacacacgtacacccactaagctaaaccacacatgatcttcagtgagagaaaattttgttaaaatgtcttgacattttaaagaattgaaaactacaagctatcacatggtaaaagggtggtgggaagtttgcacaggagagggctcattttgactgagtcttaaggacagaaagatttctgttggatagatgataggtagagaatgttctatgtacagcaaacagtcatagcaacatcataggaggaacatatgaactcttgtcagtaagtataaaggcctcaattcttctgagtaactggtaaaccctttcattaaaacaggaagactattttgggactacatagtttgaaaacatgtagaagaacttgaatgccagattagatcagaacatcatgttctgctaatcatgggaaactggtaagccttgtgctaccctttaaaaatcttgtatctttgactgctccattgctctcggtaggatatggagcacatttctttgaaccccactgtggtgtccagtataacctcagtgacggtaatggatagttgttttaaacacttttcagggtttgagggggattaagacagggtttctctgtgtagctttggagattatcctggcactcgatctgtagaccaggctggccttgaactcatagagatccgcctgcctctgcctcccaagtgctgggattaaaggcatgtaccaacacccagccatttttcagacagttttgtttcattttgaattatagattttagaaaacaacatctcactatgtagcccagactagacctgaactcaccacccttctgcctccatctctccactgtggggttataggcatataccatcatatccagttttaaatacttcaattaatataaggactttcatagaacactataatataaaagttctattttaaatgaaagaataagaattgagatattcttgttaatactttcaaatcagattaaaatctgattttcctaggtaaaattatttttttcttttgctaacattatcatgggctagaatatttataatacatatagaaagactagcctcaattgaaagttatgtaataaaaactggttttgtaatttaaaaatacataagctaaaatttttactcatactaaaagaatatatgaattagtcagaaagtagccgtgacactaagaataggcacacagtagataatgattgtttaaataactatgatgctaaggtcatgacatccaagaaagttttctgaagttgttagattttagggatttttgtttttttgtttttgtaaataggaaggaaattatgaggaattatactgtcagaaatggggtgtgttgtgtgaaaagagtaaaccttcactggaaaatgggaagaattcaaagaaaattcaaatggaaaacattatgaaagtgtctttgtaaaagtcatttcatctgagaaatgtgggataagatgaagtggccttgatcttgacacaaagacaagtataatgactgccaaagggcattccataccatagttctttctccacctatgaaacacaagtatgacctgtcatttctcctgccccaatttcaataagaaacaagtgttttgagcccttgttctatgacagctacatcaagttttaccaagcataatcccctgaaaccctgataacacaattagcaattagtggcttgactttgagtccctacaattcatttaccttggtggcttcatgggcaaaatggtcttctgcaaatcgggcttccctggtttcttccagttcaggaagtacccttgatttggcttgcacctctgctacaaaggattcatgcttctgatacttcccctgcaatttggaaatgagagtttatgagtaatgaaatgcagtctcacaggaacaccaagtactttttctgttcctcctctcaattctaagcagacttcccactccccttcttgtactcggcgatttcccttggtcatagtagaaaccattacatcctgaaacaaacaagtgtgtactcaaggtagaacaactgaacacacctcccttaatcagaggtaacacagatggtcttttctattggtacttcttttggaaaattataaataaaataatatgctactcaacggtccacacactcctatatcaataaaaccatgtaatacatggagacactgagttctctttttaaaagtacagtgcacaaaatgaaattatttattaagttcatggtgatcttgctcttgacatatgtgaattaatccattgcacacatacatcacccaatgttccctgatcaacaccaatcaccaattgtgttcttgctatgcactatgccaactgatagaggtagagtttttcaccaaagtgcttgtcttgcaaccttgtatttgaacttaacaacaatcataagcaacatttttgaggaaagctagaaaaatccctgctgctggagagaatggacaacagttgctctagaagtactgatgatttttactatcttaaaagaaatcaattgtttcatcattaatgtcacaatagtaaaagcacatgttatgtcaatagtttcttgaactctcagcctctattttgtctagtaagctcttataaaattctggcttggatgagttttatttgcagataagattctgaaagtttagaaatacaagatggagataacgtagaacttttgtctctggtaatagtataatctttctttgacatctacataattataagaaggtgagttctgaatgggacttcaatgtgatacagtatttctgtattttcaactgctgatataatgtcattttgttttggtttcctttttctcttctgtctcaaatttccaacacgataaagaaggaccaacttcagcctttttcttagatgaacttacaaacttcccattccactattttggcttctttctaacataggattagtttgtacttacacacacccttcaacattaacataaagaaaagcccagttaattttctagataatatagggtgaattttgggaacatctgtggtactaagtcacctgtatattcgtgggttcataactcttatcttttgcaatctcaagcttctccatgatccacttctccaggtcgtctgcatctctcctgaaaacttgatagtgataagactcttcaagcttctgacccctctcagcaacacgttccttgaacctctggtactggtctaacacctcctgtcttctgtgctggatttcttctgctgtttccaaaaccttgggtccactgctttccacagcctataagttagaaagtatcattatgttttgaaacactattctgtgtcccaaaatatgtatgtatgattattatgtcaattaaagattataagaagaaaaataaatgatgcctctaattgttgctatttctcttatttataatgttatccttcttacatatcccaaggcagtctccaacattgaaaatatatttacacattgttaaacctgttaattcatactgtttgaggggctgtaactgtataattttaactataaatagctattgcttagattaatagttcttaatcatccaaaatattctacagaaagaatgaatttggactgatgaagcaatatcacaaatttcagattgataataacaaaatgctagtttatattttatacccttcaaaggctaaacaccattaataagtgctgatcagaccataaatttaatgaatagtcagggatggtttgcaattaacttaatgaattacacacacacacacacacacacacacacacacacacacacacccatgaatatgtatcttctttaaaagtatagattatgtattatatattcttcttattttattaactaaaattatctaaaaatataagaaagtttaaattcaacctgtcttctactcacttgtcaccactgtaaattattagtgtttcagtattgttttttagaatataaaacattatattattatcaatacaaaattatgctttattttatagaaatccagttggtgtaacaatatccaggaaaatttccatagggtcatttctatagttcctataagaaactacttctcttgtttcttaaatctaaaaaatgcaatgcagaagtttatattttaatgtttctttatttttcaaaaatagttttctatggcccagtaattactgagatgactataaaattaagctattccacacgaacacaaactattaaaggtattatttggtctcaaataacctagttgttttctttaggaattatctgactttagcaagtaactgctgaatttttattagtatataggtataaagttctaggttattttaaaaagcaaaacattcacaaaatatttagaagcaaaattttctacaactttaaagtcaaaaagtgtgatttttagtgaccctgtgaagatggaatggaaaattcagaagagatagctttcctaattgcatcagggatgagaattcctctactcacagcttcctttgaagggtgctccatttctccccagagtctgaaagtttgctagatgaaatgtagctaaaagagaaaaaaatgttctttgaatgtgtagtccacctcaaataggaatgtcagaaacatgaatgtggcaaagaccgagaggaaaaaacaagttttagaatcccgccaagcatagacaatcagcattatctcctggggacagtttcagctgaggcagtggctgacttccacagacaaggtgactcatcagttttgggggctgtggctctcagggcctcaatgggaatttaaaaaaggaaagaaaacaaagttcacagatgcaaaagtactccagaaaaacagtgacagatgaaaggcaagtggctgtgttggcttgtgttttattcagtattagctcttagaaggtcagagaatttataaatcaggaaagaattccaggttgctccttcttggactccacactggagagctgagggaattcaaagacgtgactttcttgttctgatctctttctaggaagtacattgcaaccactttgccaagacccagcttcatgtatttaactaccttttggtcaataacttaattcaaatttcctcccggatctttctaaaaattgagagattttatgtgtgacttcatagattaaattcctaaaaatatgatccagctgtacctttaatcattcaaatagaaagtacagaacagtaagatatgtgaatatgcttattttaaagttaatgagacaatattttaaagttaatgaaacaataatcattgtttggaaatatatatatatatatatatatatatatatatatatttcacagtgtttggacatgcctaagatatgaggcagaaacgataccattttatacatatttaagggggtagaaattctttctaagataaagttcctttaagttactttattaaagaaaaataggtaaacaaaatatgatcaaacaatcacgaagcacaaaggtgttagccagctccacccatatcccctttgctcttgttgcttatgctcttgttcctgtatcccagaaatcattgtcaaaacctatgtcataaagccttctcccaggcttctttcttctatcagttttatattacacttaagtctttcacatagtgaactgaattttgatgtaatttaggatgtgtccaatttctttgtttttgtgttgatattaaattttcaaagcactatctagaaaagacttttttttttcatgacactcagtccagtccagtcgatttggccactgtgtgtgtgtgtgtgtgtgtgtgtgtgtgtgtgtgtgtgtgtgtgtgtgagagagagagagagagagagagagagagagagagagagagagagattataggttactaaatgttttgtacttatggtgagatggacgcagaaatagagaccagaactgtaaatgttgatggactaagggaagactgactaaaagcaaggaacagaatgcagtaacattcatattggtgtgggcttgacttagtatttgaatacctcaaagccataactacaagatgtaacttcgtattccagcctttttattatgttttcatacaaataattgagactatataacttgcagaatcctataaattatgtgagttaatcacatcaatatgtgtgatagctaacaaatcttttggataaaaataaaatattttctcttcctcatttcaactctaggcagagtttcctcagcaatgtgatacaacatatttactaaactggtacctgtaaggggaaatgctaaccacacctgcttgagggctgacacagatgacgctgaccacaccacgttcaagtttggacatctctttcaggtgcctttgtctttcctatcaatttttgtttgagtatattaaaactatgtaaaactcatcggggaaaatatgaaggagcttcatgaaacttgtctaagtaatgacttcttgagtctgaacaaaaaagcaggaaccacaaaagacaagtggtacatcaagttgaaaagcctctgcacattcaagaaaacaatcaacaaaatccaaggggaaacatatacaagacaaggaaataaattgacatatatttgatgaaaccataaagtcacaccaccatttctgcctaaacatgagatgcacaagaatgacattgatagacatgccaaagtagatgggaagcccacaaggtctcaacttatacaaagaattacagacaactaagtgatgttgaatgggaaaaatagtcttcccagaaaatatatacacaagtaatattacacagaatgaacaggttatacttaggtataaatatgtatatacatatgtgcatgtaacaatgattaatgtaaaaagaagccattaatttaaaaatgagcaatcagggatacatgggaggggttggagtgaaaaagggaaggaagagaaggttgtaattataatttcaaattttataaaagtcttttaaaagaagataatgcttggcagatcgcatagaaagagtatatggtcaaaaactgtgctcattgagtgagttacataaaggaatattaatttgttaattaaaaactcataattggtcatgtacagatagattaaagagaagtcacaagaaggaaattatttaattaaaaagtagtaattagagtaatgcacacatgttcaaatatagttacatgaaaatagcctttgatggtctgaaatgacaagagtaaaagctaattctggactgtgaaaggagcttttaatttttaaaggacattgtttgctgttttgactcactttttaatcaaaccttagggaaattataaaatgaatgattttacaagagacgtcttctttgcatgggtggggtgatttggagggctgtcattctgggtcttggttatcagctctgggcatatctacacagcagtaatcagccctgaacagcttgcttcattcaggtctcagcatcaggacaaagtgaggtatttgatatcctcttcttggcctcagaagatccaagagctccatagccaaaaatttacactttctatactgtaaacttactttaaagtcaatttttctctattgattcatcaacaaagacaaaacattaaagttaatatgaaactaatatttcccatagaatagaattcatcattaatccattctcttgagatttagccttttattttgctggagctacttcatatttaaaaatgtctttgaactttgactattagggtgtgtcaaaatagtagacatattgttcagaaaatgaaaaagatattctgtttggggcatagggtttccataggtatctgtaaaactctagagatacctgtccatccatgttcattcctgctctatttacaaaagccaggaaatggaaacagcttagattttgatcaactggtgaagagataatgaaaatgtggtactttcatataatggcttattacctagctattaagaaaaatgaaattatgaaagccatgggtaaatagttggagagagaatcattctgagagagctaacccagacccatccggaataactaacataatgtccatgctttctatcatttgtaggtattagattggaatcttaagaccttcacttgcatatggaataccctttcaagtcaggaaaccggtaaagaactataggaaggagggcctttcaagagaggggatgtgttagggagggttaaagtgctataaagtgttagggagggttaaagaagctggaagggttaaatcagggtgaggagagtcaggaagaagagggaagaggagggaaaacaaacactgaagatgtttgacaagactcacatggaaacttactactacagaaacttcctaacatacacaggtacacatatgtaaatatttaaatggagttcattcataataggggaacaaaggtcctaatagatatcacagtcccacaagtaaaacaatccagtgccaggaataggctttctcttttagtatttttggtgctttaaatgagacatcttccatactctttggtccctagttggtagtgctgtatgggcggtttagggggtgctgcctctctggagaaggtatgttgctagaagcaggctttgagcgttttaatactcatgccatttcaatgaactttctctgcttcgtgctttcggttaagatatgaattctcagctactgctcccgccatcatgtctgccaccagtcgcctctgctcctccatcatggactctaaccctctcgaactgtaatccatagtgtttcatcatcacaccaatagaaaagtaactaacacagtattgttgtgaggcccagacatcccgcactccaatgaggaggcactagaagagctccaggaagcaactgggaacaggaacatcagagagcatagacttagacacaagttaagagtgggcagaaagctcatcaaggctaggagaggcatcccggcatgggggatataaaagccaacaaatgcaccagggacaggtccggatctcagctgtgggctccttgaagaatcaaaattaggccttagctatttgtgattcccatcatgatagaacaaatagaatcccagtctattgactgatatcccaggttatatggtacctctccattttctcaaagcaatggtattagaaaatatttcatggtggttaaagcaaagcttttggagaaggttacatctgagtttgaactacagcttagccttttgtaaaataaatatacttagacaagtcacttagccactataacccatctttctctcttttataataggaatgataaaatgaatactacaaattacctttgaaaacaaaatataggagacaatacatgtcttaaaaatataaatgtgtaataaatagaaaaatgcattgttagtatcaaaaacagaaagcaagtatgaatttatattgttattttacttttgcaataatattgtgttaataagttcagtgaaattttggttaagcaagtatgtaaacaacttaaagtcaccagtgtgtgtgttagtagctcccattatatccaaatcagaaagcatgtttcttgaattctgtgtactcatgccggttatattcataatgtaccattaatgtcatcataccacaagctttaactcctttatttttctctgaggttggaatagtttgtgttcaacacaaacacacacacacacacacacacacacacacacacacacacacacaaacacacacaagtgaaaatgctataatttgcagagattacgtttatctgtggaaggttcccaggcagagtagcaaactggtatttaagaaataagccattctgtaggaagtaggaggctttgcttcaatgtaggagagtatggaggtaataattagctatattaatttctagaggcattggctatgcctagaaaacaatcacgtaatacaaaatttaaaattgtcatggtgagaaaaggacacagaatattttttatacaacagttaatcataagtatcatgtttataatgatattacagaaaacaagggaatggtgtttgttaagtacttacacagcattaaaatacaatattttcatgtaagttttgtgaaatcacaaatttcaagaaaatttatagacttagaatgtatactattaagtgaagtcacaaatccgcagaaagaaagacaatcacgagatgcaacagtattgcatgagtccctttgtcatttttctctcattccaaaaataaagtatcccatgtaatcttactttaacttctacccacaacactaaactttcctcctttccctgttttcttcagccaagttcagggttgaatggcattggctattgaaaagtaagacctttcttgttacctctgtctttctacagcttttaagaatgaaagtaagagaagcacagaaagtaggctaacaactacagggtttgtgttagtggaggaaggaggggtaaaattttgccagtatatacagtgtaatgagctttatcccatccaaactgaagcataggtcctggagaaaattactccttatgaaccatgcatgacgggatgtcagtaaaggaagtccttaacactgtaccatagagagtataggatcttgaaagccaagggaataaagtgtttgaaaatggatttctgttcaatatgttggcttgttagctacaacaattagaacttagggtgatgatgtttgtttattagttcaatagatatttattatatacactgcttaataagcatgacacacaagaatacactgaaaagaatacattttaatttattatgaaaaactgttactttggcatataacagcttaaattcaaatactcaatttatggattagggttgttcctcaattctatactgagtggcacttgatatattcccagcaactttttgtgacaggatttctctacgtagccccagctgtcttggaactctctaagtaggccaggcttgcctcacacacacagagatatgcccgcctctgcctctgggattgaaggcgcgtaccaccacaccagccttgttgtcttatttattgtttatttgtactgagaacaaacctcagggattcatgcatggtagatcagcactctacctactgaatttcatcgcaaatcataaaataggtgttccagttatgctgaaattaaagtgtttatcaagataacttcagcaaaataaagttactgtacataacaagttcagttgatgaagttacaccccaaaatatgttggatttgataatattgaaaggaaactatcaaatttagggggtggggtgatgagtcaggtggtcaaatgctttccattcaacaaaagcagggcgcagcaactgccatgtggagacaatggatctgcttagccttgctggctaaccaattcagctaacgggtaagcttttgattcaatgagagaccctgtctcagaaatcaaggcagagaagtgattgaagaagacatctaatgtctatttctagccttgtcacacatgaaaacatgcattcccaatacatgtatacatacacatgaacacataagaaaataaaaattaaatctaatgtagttatttgtaaatttcatgtatcagggacatttcggcaacaagtttcagtaaaaggatgataaaaagatttctgaacggtgagaatgaaagagaaccaatatgccctccccaagaagagatgttatgtgaggtttctgttcttatgaattaagatgttcacttgacctatgtgcttttttatggcttcttttatctctttgttcctcaggctatagatgatgggattgaagaagggggatagaacggcaaaggccagagcaatggcagtgtcccagaacaaggagtaggtagcagagaagcggagatacatgagagccacactgccaaagaagagcagaaagaccgtaaggtgggagacgcacgtggaaaatgctttgcggcggccttcagctgaacggatgcgcaggatcacagccacaataccaacataggacatgaaaatgagcatcactgctgtaattatctcaacagcatggacaatatccaccacctgaatcatgacgatggtgtgggtgtctgtgcaggccaggcgcagcactgggaggaagtcacagaagatgtgctccaggtgattagagccgcaaaagggcagggtagagatccaagcaatctcagggaggggtgtgagaaagccacagacacagcaacctagggtcagttgggcacacagcctgggagtcatgatggtcggataatgaagagggctgcagatggccaggtatcgatcaaaggccatagctgtcaagagacaaacctcactgatgccggtggaatggaaaaaatacatctgcaggacacaaccattcaaggtaatactccttcgttcactaagtaggctagagagcatcttcgggatggtggctgtggtgtaccaaatctctaggaaggaaagggcactgataaagaagtacatgggcgtgtggaggtgcacattccgctggaccactgtgatgataaccaggtttccaacaataatgaaagcatagatgaagagcagtggaatgaagcagatgacggaacggccccaggagcaagggaaagcagaaaaaatgaactcctgagcagcggtccaattggagaactgcatctccaagtgagaagtgtgagtgtcaacaattccttgtgcactcaagctttttagaaagtgtctgttataattccaagggaaaacacgctgaacaagaaccagtcttttgtttttgtttttgtttgtttttcgagatagggtttctctgtggctttggagcctgtcctggaactagctcttgtagaccaggctggtctcgaactgacagagatccacctgcctctgcctcccgagtgctgggattaaaggcgtgcgccaccaacgcccggcctgaacaagaaccagtctttaagaagactcctgcactgtggctgtagatgaagagggattaataatgaaatcatatgcactctgcactggctttcaactaatcttgttataagggaaaacagaaaacacaacccatagtagacctagtaattctcaggttctcacatggctcagaatcagtgagtgggctgtcaaagctgattcctgggtgcccttaatgtaagttttcttcaggaggtctgagataaagcctgaagatttgcaggcgatgtttatccactgctcagtaaaccatatttgaaaaccatcatttttagatatctggaggaggacttcaagaaacagggatgaaaatgattctcattcctgaattccaaccgtactgattccccaacaatgctttttttttcttttgattgagttcatctgattcttggcacatgatgtgaaaattttcttttattattaaaaatagttttttcatacagtatattttgattatagttttccctcccaatactctcagttcctccccacctcctctgccaccgggattcacactcttgttagaaaacaagcaggcatctaagggataataataagccatcactggggatttctaccccatcttcttccctttcttctaattagctcaccacctcttcatatgtgtatacttaaaaatgattcagaagataaagtataagggtgcttttgtttgttctttaaaggatgtaccacccttcttcctcctatcactttgtcagctcttatttaagagagactagaaagtgttttgtatcagaagtctttgacaaaatgacactatttgtgaaaattgagtatgttaagctgtaaggataggcttgttcttataattcttgggggcacattgggaagggagacatgtaaagtgcaatggactctaatcagaaaacaacaaagcacagggcatcctcttggttcatttactctcctctcctaatgatttctttcacagtttctactgatttatttttctttcagtatcaaatatgtttgcttggaggacaatgcatctaaatttagactatttttttctttatataaagtttgtttcctaatgccttgggtaattctctctagttccccaatctcttctaataaattatttaccttcatctttccatattggtttccactcacctccaaaggccagttgtgcaatgctcagcagtcacctgcctgttgagtccaccctactcaggtttcattcttagatattccattttcatttcccaagtatgtggataactcaatattctgttcttatttcattcttctgatctgtattccattccacacagaagagtcatttaatttcaacatttcatttattcaagattcccaatttccctttgttctttttcattaacactgctttataaatctctgttctgaactgttctcttgaccccacactgacttcccccttggaagctttacctttacccagtttttagtgccacctattgtgtcatgagaccagcccacttgggaaccacatgttgagtttctaacccccaggaccactcagaatatgtatccattttcacacacagcatccaaaggtgtaattgagtcaaaataaggtgactagggttgagcctagtgactggtgtttctgtaagaaaaaaaattggtcattttcaatggaaacactgaggtagactctgggaaagatggcctcctaagaaagcaactgtgtcaacaaacccttgagttcatccttctcggtccctgactagtgggaagttaaatttctttttaaaaagatactccttaacaagtttgtacatgaccttagtatcagctttcaatatggttccttgctaactttcttatttttgttcctatatatgccaagcatactaattttattactctttccaatagtttaccaatcacatcaattgtcaaattatatttaatttaattcttttattttcactatctatgaactcccaattatgtgattaagtcccatcaaacttctcttgtttgcatataataactgaatcattttcctttaactctatagtgaaattagttcttattttctgtagaaattaaagttgctttatctcccattgctataggaacttgctacttccacattcagttatagaagggaattttattttactcatgtaacttatacatttcagtttctaaacatctgtaagaggagtctctcttttcagaaatatcctgttcttatttcctttcgatctctacttctttgttttctaagcaagtttgtgtatttcttgtagcgtttacatcgctgcttagtctattacttgtgatatatttgtatgtatatggtaggagaaaatggcttgttatctgtgtttattatatatatatatataatatatatatatatatatatatatatattatttaaaatagttttcaagttttcttggtttttcaaaaatataaatcttgatgttctcaactgtagctggcacatcttctaactattgcccccagaacatgattctaaaatgtgaatcacatacttgttcaagaaagtaacttctaagtagactcagacctttctgtattttctaaatttgtgctatgaagccacagaaagtatgaggaaatcctgagccaatagcaggaatacttatgtttatccattgaattctgttacccttatccagatttcattagtgatgggtctagcacagttgccacgacgtcaacttccaaagcctgactggaaaagcacatataattatgggaccattcctgaaacattttagaaatcaatctcagggcccgtctatgttaaatttaaagcagtcctttgtgtagtgaaatctactaattcaaacctttatatgttgtactgactaagtctagaatactttttcataaaagccaacccaaaggctactcacagcatttacgttcctggtggcattgaccattactattgtgggtgtgccattttttttctctatatttctcccatcacccatccaaatagtgaaaccactgaccttgctgctgttggggtccaagtcagaataaacatgaacgaagactcccttgatgtgtgttgaggtatctaactgacacaggagaactaacttcattgactatgcttccaccctgagtcctctatctaaactcagtttctttcatcagtcggtgatacaatagatccgattctctttgtggttctccccacattttcttccctctttattgtttcttaaatatgagtaaaatgattggctgtcttgggaattgtacataaatgactcaagcatagtaggaaaaaaaatcatccccataatggcttcatctgggaaaaagatctcaggctagtaattaggagaatctcaggtccaaggatcttcagctcatttcaaatgggcttgggggttcctgacatgagaattgatttactcttcttcctttatttctttttgcccttctttctgtgtgtctcctaatggtgttgatgctttaatgagtcaaaatgaagaaaatctaagagtcagatttgagtaatgttgcaagagtaaaggaggggagatccctgggaagatgaagtgggaagttggaggggctggcctgatttttttcccaggccagtcagctcagtttagaaaaatcaattggccatttgaatatttcacctacttattgcttattgaaaattaaggtaattttattgatttttctttgccttatatcctttgtgcattgaagtcaggacttctcaatggagacaaatgtcagacaaggaaagttcccaatgactaaagcaaattaatcatgtcatatgatgactgtataagactatttaaattatagtcccaacttttacacaatcagttgaatttgttctactcttgaatatctcctgccttgtgatatggtgtaagcccttcttaaaaaagaaaaaaacaaaacaaaacaaacaaacaaaaaaaacccatcatttctgtatggaaaacaaaaagtggaacctatgtgtgaattttaggaaaacaaaacaaattacatttcttctttaagtagcacatcatatagtaagtgatggctagaaatattttttctaaaattcatattttcagactgataacttcaaattaatgttaatattgtgttagaactgcttactaattataagtccataatttaacctattttatatttgagtttacctgactcctaactgaacaaatgatctccttagacttttatttttcataaaatatatctctaaataatttcttgaatgattgcacaatcaaataaaatgtgagtaaaagagagaaacagttactcccaaagcgctaggatattcctaattaatctcagtgatagacctcttaagacaaaggggcaaagaatgctacaactgaaaatgtcaaattccattcccactgttggaatttgcagttgagtcaacagtgtctgccagagcccttctcattttaaaatgttattctcaaagaaaaatttaaagttgagatcaggatatttttggtgtttcctatgttttctgaaactctataaaacaaatagtttatttacttcaagaagattttgttaaaaacacattacattgtattgtataatgcctaattatgtacttaaattttggtgatctcccattcatacataatgacacatctgggaattgtattagttgcattttaaatttactgaaaaaattcataaattacaacatttgacatttacaaattgtaatacaccatgcacacaccattcttttagattttcaaaccttataagattaatgaaatatatagatacctttctccctccagattactgccttaataaaggactttttattttgagaaaaaaagctcaaagaattaggctcctcagaaagatatcaacagtatcttctatagtaaaaaaaataagaagattattacaccatttttgaaaggacaagtttcacagaccaagtccccttcacatgattacattgttacactgtgttgaaaagtcccacagagtactcataggggataacacactttgctctaactaaaagttgctttcagctgctacaactaaatgggatttccttagcatgcaaagaagcaactatggttgatttttcttttttaaagaagtatgctacattattgtcataaagatatcaaagtaaaaacaaatgaggtgtcaaaactaaaactaaaaacagtagaataaaacatagcaaaagtaaacagaatacatattaataatatattaataaattttaattataaattactaaataataacaatagaatgaacatcaaggaaatgaaagtggagtcaggtctagggccatatgaatgaataggcacaggaaagacacataacagtgagaatgtgcttactactcagggaaattaacaggaatgatctagtatagatctcatattggacaagtgtctaggtaaagaaataatcagttgagatttctaaagtctactatgtatgtaagtgtctccttgtcattggcattgtctctgtagttctctccttcctcagatatattttcattatccttgataaactctaagttgtcatctctccagtcttcattatcaccctttgccagacctcctcctctgatctgcctcagattccatcttcacagtggtctcatctgtacacacagagctgctactctgaaccacttgtgattttccattcttcatctcttgattgtttgttccattgcttttcaattcttccccccacccctgcccccgttttccagtagggaatccacgttgttttatctgggccagcttcttctcaaagtcccaaaggccatatcaactttgaaggtttcaaagaagatcaaattgtctgtttctagaactgaagccactttttttccttggtgagatatttccttatacatgataatgcttagcaggcaccacaatagaaacagtaggaggaggaagaaaataagagaggaaacaaaagaggaagaataacacaggcttgctataaggctgagagtaaagcaattaccctgggtaagccctgccaggaaataatatgtagaatcctagggttgtccagaaattactcaatagccaaataagagaaataccaatctaaaattgtgagacaggaaggtgcctacaacctactgagagaccattcattgcaaggttataaatttataattcttatagtaatgtgtagaactgaggcctgtaacttaatatatcagaattctcttttagttacactacaacttcaatttgcccatgatcaaatcaataggctccacaaaaatacagcaatcagatttaagctatagatcatgctatgacatgctacaagtcatgttgacagtcttacattcatgtgtcagttatacaactgtgatgtagccaatgttttatcagtaatagtaaatattttcacatttctctgtaatatatcaacttcttgaaatttatcttgaagcaatattttaggaaagcaattttgtccaaatatataattactagatttatgagatcatgatatggagaaaccctgtaaaatttcaagttagagtaaatttatagcacatcagtgtatctcataattaagctataataaacgctacatgaatatataaaccctggtgtaaatttttaagttttacaaatatgagctatcaagtcaatatgtataatattaaatatactacaaaatcaggtattttgctacttcaaagggaaaaatgaggaacattttagagtgatgaatgaaatacatgtatttgttcaatttcagtttactcatattgacattctataaaaattcaattgtctttatagtgactgacacaataccaaatataacctgatttcctattgatgaaatgctatattcatatcacagagattcatgtgtcttaaatgatcagaacacagccaggcagaacacactccagcacttggaggcagaggcaggcaaatttctgtgagtttgaggctagcctggtctactgtgtgagttccaggacagccaggttcctgcacagagaaactctgtcttgaaaaatcaaacaaaaaagaaagaaagaaagaaagaaagaaagaaagaaagaaagaaagaaaggaaggaaggaagaaagaaggaaagaaagaaattaaaacaccatgggaaaggagataaagttgaaaataaaatgcctatagtgtggatgcaaagaagatttctttctctaaaacttgttaaaaggctttggactaacaactcaatgacagagagagagttactatgcactctgatgtagaatgagtttataatgactctcaggttattgtgaagataatagtgtagataacagtggccaagaagctgagtcaaaaaggtaatggctatatatgtacctcatagctgtaaacctaaccattctggatatatatatatatatatatatatatatatatatatatatatacgtgtatatatatatatatatacacatatatatatatatatatatatatatatatatatacacaatggttggggaaattaagacaaaatttgttaattttataattttataatctctgtgaattctcagaagatataatttatatatccatccaccagttcattgaaaaaagtgatcaattgcataatttttttaatttacattctttggatctttttgaggggggtgatcttgtttaggttaaaaaggcataagcttaaattacctacctgattcattgaataccttttgagagcaaaagagttttttaattgcatctttcatgtccttatttctcaggctatatataataggattgaaaaggggagcaaatacagaaaatgtaagagcaatgacgttgtcccagaatggtgtataagtggcagagaatcgaagatacataagggccacactgccaaaaaacaacaggaaaacagcaatgtgggcagcacaggtggaaaaagcctttttccgaccctctgttgaagagatgcccaggataacaacaataattcttatgtaagaaagagagataatcagacttgttatcagaatagcgagagcatgaatcacatcttgaaccaggatcactgaggcatctgtacaggctaacttcaacaaaggagtgaaatcacagaatatctgatggatttgattgggaccacaaaagggtagagcagaaatccacacaatctcaggtagaaggatgaggaagccaaatatacaagagccagcagtgagctgagcacacagccggggtgtcatgatgttagggtagcggagtgggttgcagatggcaacatacctgtcaatagccatgacagttagtagggtcccttcagtgtttccaagtgaatggaaaaagtacatctgtaagaggcagccaacgaaggaaatggtcttttcctcactgatcaggttggagagcatcttagggatggtggctgttgtataccacatctcaagaaatgagaagatacctatgaaattgtacatgggattgtgaagacgggtgtccagccttacagcaaagaagatcattaggtttcctgacacaataaagatatagataaagagtaaagggaaaaagtacaggaggccaccgttctggagctgggggaacccagtgaagacaaatacagtcactgttgacagatttccattctccatatccccatctgagtgacctgtgaatgagagaaaggccatattcaactaacatggaaggaagttaaagcagtacaaaggtaaatattgaggctgggagatcgatggctcagttggtaaaatgtttaataaacaagaatggggacctgaattcaggtccacagcacccatgtgaaaatgcttataatcccagtgctgggaggtcaactcaggagaatcccacaatcttgctagctagccagctagccatattactaaacttcaggttcaatgggagtacctgtctcacaaaaggtggagaatgttggaagccagcacagaacattgaccccagcctctacctgcatatgcttacatgcatgtgcccaattcatgcacacacatgcaaacatgtacataccaaatacatacacataaatgtaaatgttgctttctttagatgacacgtgtaatttgatatttatgagattcaagaaaataataacctgcctatatctctatttttgcttttggctgaacatattatgatagttaatcgagtagatcatgttaaatatatggagcctgaattttcattctgtttactattatttgggaccagggcagcttacataactttgctgagtcttgtattttccactgtgcataaaagtacttatgttgagatgtgttagtcaactgagttgatttataaaagaacccataattgatatttatggtatttatttcctttacagaccaggtacctgagaaaattatgttaactatgtctgctttagattgtgttccctcctccagcatttgttaggtagttttgctccttcctgatcttcagaaaccattctgccttacgtatccctgtcataataatagtaaaagcaatattaattccagtctttatgattatacttttgaatcaggcatagcagcctactactctttgaaaggttttgttattgatttgcactaaaccatcattcctgcattttctatcttcctgtagggaagtttttcagatgatttgttatttaaatcactattttgtacttttgtgtgttgaaagtcatgttcattactcattctgtatttcggcaggaacaccggagtcttgatccttaaaatctggtcaatacacattttctgttaaagaaaatactctctcatagttttccattatcccaaatctgaagcttttgacacattatataatattctccatcttcacgctctcatatttcactgtgacagtttcacatttcaccacgatactctagagctttggtgacttttagcttttttcctaggatgtccctttgctcatgcttatttacctggctaactctgatatattctcatttcaattctgctcttgtctttcaggagaaggctactgtcatctcctctgcatatttaaacacacacacacacacacacacacacacacacacacacacacacacaccacttctttattttcacacatgcatcatccagatagtctctatcataattcttacactgtcactgttactagtttctattggggcacagtttacccttgatagatcctaggtacttggaaatagcttcttttgtaatgaaaacatttgaattggacttaaaagcacaattaaaagagaaaaaatctgtaaatgtgaaaggtgggaagggaaagtgtcatcatttacactcatgaaactgagcacaggacaaacaattgactgctatttctcatgtaattctgcagagcctacagctacacagatgaaattctcgtaagttccaaccaagtttcaaattacacaccaccaaaagttctcactatttgaacactcagcattcagttactggcacctcatttcaagtaaaagaaatgaatatgctctcctaatttcagcatcccaaaactcacctctgtcaaagtcaggctgtttccgtctattcctgggtatatctgtgtctcttctttcaacatctctaaaactttattgtaatcatctttagaaatattctgaagggaatttgagttccacaggggttctattccctcaataacagaaagaaaacaaccccccggggtcacttggcagatcatactctgttgtttctgttcgttagaccctcaggtcagggagagtcagtgcccagtgggattcttacagattctgctgaaaactccttcccttccccatcactgttatgactgaaaaaggcattctacattatgtatgacactaggagctgctgtgccaaaaaaatgccatgtaaggatgctatcattgttaagtttttgttttttgaaaaaaaagaataagtggggcagtattgagggtgatttttctgacaagtgtcaccaataaattgaatagaatacagaatgatttctattaaaaatttaccaattagaagccatgagagttcaaggatgaaaataaaaaataccacattttatttcttcaaagtctccacaagtctgtctaaatttgtccaattgatttgctgaacccttcatatttcttatttttcaccacaaagtgcaccaatgatttatctccatttcctctcttgtatagtgtcttcctactcattttcttctgtattccccacccctgttcctcaagagaaaacagcccaacaaattatggtcttactgaattaccatcaaaatttaattgcatttttctgtgttgaggaataattatcacaaacaactatttgttctaatataatgactattttgctattcagaagcaaattcagtgatgcttgtgtgtggctggatgaatgacatttaaaataattggaaggctgagctgtggtggtacacgcctttaatcccagcactcgggaggcagaggcaggcggatcgctgtgagttcgaggccagcctggtctccagagtaagtgccaggataggctccaaagctacacagagaaaccctgtatcgaaaaaccaaaaccaaaacaaaacaacaaaaaaaggaaggcagagaagaatttcaggatcaagtaaatggtcctgagataaaaatgagaaaatgggatgttttactttttttttttttaaataatgaaatagtagcgatttattgtagaggaggaagatttatttcattatgtaatactggcataagtaggtagcaacagaaacaaaacaatagagcatatttatctttcagtactactttcaaaattaaggtgcaaagagaagaaacaaaattatgatcaatgaaaatgtagaagtaacacaaacatgattcaggaaacaatttctacttgcctatatgtctgtttgccaccatgtgggtgtgccttgttcccacagtggccagaggagggtagcggcttcactgggacaggaattatagacagctgtgagcttccacacaggtgctcaggcttgaattcaaattctctggaagagcagccagtgctcttaactgctgacctatctctctagtcacaggttttctgtgtcactcatgatttcagtgtgattttttaaaatctatttttaatttttttcatttattttacagcctgaccccctctctcctctcctcctattccttccccccatctcccttctactacccctcctcctcttcagtctactttcagaaaggggcaggcctcccatgggagtcaaacacagcatgatacatcaagttgaggcaggatcaagctcctccccctgcatcaagattgggcaaggcaacccagaatgggggttggttcccaaaagctacctaagcactccagggacaagtcctggtcccactactagaagtcccacaaacacaccaaactatacagctgtcacatagatgctaagagcctaagttagtcccatgcaggcttcctagatttcattccaaagtccatgagctcccacaagctcaggtcagctgtctatttgggctcccctgtcatgaccttgatgcacacacattagtacaatggagttcggcccagcgcttggctgtggatctctgcatctggttcccaaagaattgaatgttctgaatgataagaactttaaatttttgatgaaattgaagaagatatcagaaaatgagagctctcccatgctcatggatcagtaggattaacatagcaaaaatgtcagttttaccaaaagaagtatatacagattcaatgcaatccctttggaaattccaactaattatttacagaccttaaaagaaagacactcaacttcatatggaaaaagaaaaagcccaggatagctaaaacaatcctgtataataaaggagcttccagagatataaccatccctgatttcaagctctactatagagttatagtaataaaaacagcatggtattggcataaaaaaatggacaggtggatcaacagaatcaaacagaagacagtgacgtaaatccacacacctatgaacacctgttttttgacaaagaagtcaaaattcaataatggaaaaaatagcatctccaacaagtggtgctggtgtaactggatgttgtcatatagaaaaatgaaaatagatccatatttatcatcctgtacaaaattcaagtccaagtggatcaaaggcctcaacataaatccagttacacggaagctgacagaagagatatcaactgaaaatgcataacaagtaaaaagaagactaggcacgtacccttatatcaaggctggatgaggcaatccagtaggagaaaagtgttcccaagagcaggcaaaagagtcagagtccatacccacttccactgtcaggagtcccacaagaatatcaaactacacacaacatatatgcagaggacccagagcagaccaatataggctccatggttttcactccagtctctgtgaggccccatgattcctgcttaattggttctgtggtttgtgttcttgactcctctggctcctacagacctttaggtaattttatgaatcattttctttggaatctactgctgtagagttaatatgtccttttggaggcagcttgataccttgctgtgtaagttactcatctattgctatgaagagacaccataatcaatgcaactcttataaaagaaagcatctaactggtggctttttatagttttcaggggttagttcatgatcatcacagcaggaagcagataggtatggcaatacagcagtagctgagagctttacgtcttgttccactggcagcagagaaagagagaaagacttggcttggaatggatttttgaaatcccaatgacacacccccttccaacaaggccacacctcctccaacaaggccatacctcctccaaaaaggccatacctcctccaaaaaggccatacctccaagtcctttcccaactgttctactaactggggaccaagcacacaaacatatgagcatatgggggccattcttcttcaaaccatcataattatgtttcatgtttccagtgttcatatattgttcattaaggatatggcttctaagttatctctatcagtttatgaggtggattctgagtaaacacatttgtcctgaaaatgtatattaggatgctagcttagtatgtgtagtattgggtttgtttccaactgaattctgtagtatagctttcctatagctacttggtgataattaaagaccttaggtacattgtgtaacatggaagaattggagctatcagtaacctctggcaaagatactcatgtgactcagacaggtacattgcagatagaagtaagaagcccctaaagtgtctttgcattttagttgagaaacaatttgtgtttagaaaagaaatagtctgtttcatgagaaaccatttaatttcagttcctagatttccttctttctagcaatctagttatgataccctattcttggactgacaaaattaataatattaaaacatgaggtgttatgatggaatattaagctctctgtgtgtatgcattgaataataaaaaggagaaatggtgaaacagagatggacaatgctgggagagtaagagagagaacatacatttctgattgcaaactataatgaataaattttaataatccaaatgctcatattaaaatgaaagcctagcccagagtctaagaagaaaatggctgttgtgatagcttacactttccaaatgtcttagcaacctgggagctactggtacatcacttctctactgtgtgtttcagtttctcctcagacttcttctctcaataaatccaagtggacaggtccattgtgaaatgggaaatatcctatgaactttgatttcattttcaccatccagagttcttcagcagaccattaattctccaaactctgattatccctctcatgatacaagtttagtctcccacctaggattttcttttgttttctctcgtaaaatctagtagatgctccttcctcacttgcattcaaaccccaatgatgagagcacttgagggaactcacttcttccaagggatgatgctattctgtttttgttttactttatttgttgtaatgttgatgtttttaaagtgaatgtctttgattattagtgtatcaaataacaaacagaatcaaataatggtttggttgttttgtccaaatgaattattattatttttccatttcttaaaagatagggtatttgacatttcaggttattaaaattctatctcaaatatcctaattttatacttgtttcactctttgttacccttaaattttttcaatactcatagtaatcttaacttcatattcattgaatttgaagagaaataaaattgtaatatatgggtattaattgttttattaatacaggaatctacatttgaattgtagaaagcaatcaaatccatataccacaaaataattcctctcacaggaggttcctattatcatctatgtatctatctctaattttttgtgaacatgtgagggtcattttaaaccaaaaagtctaagttggatgaattcaaccaaaatgttcaaagagaatgaaagtacgagtcttcctgacctctgagaaataataggaacaaaaatgctataagtaatagccacatataagattcctaaatacatgcttttagtatatttatattatagcattacttaaaacatcaaaaccattgtcaataccaaataacaacagttaacacttgtcttttacttgctttttaaaataatattccaaaatagctttgaatagctcacttaattttaaatttacatatgaggtcacaagttaaaattgcattactttaaaattacagacattgaaactaagaatcaaaaaattaactaaagatttctttgaagtcacaaagttagtttgcaatatcatttaagtataaattttgacatctatatatattattctaagtactatttttcacaatttctgtttgttattaatgcatatataatatatataattttgtataaaattaatgtttacaaaatatgttactggctagaaattcatatttgttttgtgtatgtcacccttcattgtagtctagacaagtatttgctatctgaattaaattaaaacagaataaatacaggaagatctgcaaaaagacatgaagagtatcagtgtaataatgaatgagttatgtgctaattttatggtttagtatattggagttaaatctaaagaaaaaggcatctatgagcagattaacttgcagttgtagacagtatcctctgagaacagagaagcttcttaattgccattttcatgtccttatttctcaaactatagatgatagggttgaaaaacggagcaagaactgcaaacattagtgcaatggctgtgtccaaaattggtgggaaagtagctgagaaacgcaggtacatgagtgagacactgccatagaacatcagaaagacaccaagatgggcagcacaagtagagaaagccttctggcggccttcaccagagggaatccttagaatcactgtgatgattctgatgtaagaaatggcaataaccaagacagaaaagatgatggccacagcatggaccacatcctcaaccagaatcatggaggtgtccgtacaggccaaacgcaacacaggttcaaagtcacagaagatctgatgaatttggttggggccacagaagggcagagtggaaatccatgcaatctctgggagcaacacaagaaagccaaagacacaggaaccagcagagagctgagcacagagcctgggggtcatgatagttgggtaccggagaggattacaaatagcaacatatctgtcaatagccattgtggtcaacaaaataccttctgaatttccaagtgaatggaagaagtacatctgcagcaggcagccaatcatggagatggtcctctgcttgctgatgaggttggagagcatcttgggaatggttgccgtggtataccagatctccagaaatgagaaaatgctgatgaaattatacatggggttgtgaagacgagtatccatcctgactgcaaaaaacacaatgagattcccaataacaatgaatatgtaaatgaagaacaaaggaatgaagaagaggaaactgccactttcaaactggggaaatccagagaagagaaattctgtcactgaagtggttctgttactcatcattatagtctcagcaaagtttatcctcatgggtagaaatacacagctcaactcctagatgaaaggtaaaaagtcagacatattggttaatacaagaaataaatggaaggcaatatttaggaaaacaatgcatttctctctattctgggattaagaaatagataccaacttggtaccaatgctgtccctcagatatctatgcatttgttgcttctagtagtgaagaaaggagactattttcataaaacttatgtcccagtaaagaatacaaatagaaaatggagcatggacaaagctcattggtagaatactttcctaccatgcccaaggccctgcattcgatcttcagcaccacaaaacaaaaataaatatcaaaataacacatcaaaagtctaaagtttgctgagcagtagtggcacacacttttaatcccagcagttggaagacagaagcaggtggatttctgagttcaaggacagcctggtctacagagtgagtctaggagagtcagggctacacagagaaactcttcctcaaaaaattaaagtatctaaggtacattagctgaaaccgagtataatatgggtgtgatgaaaattgccttttatattaatttcaaagttatgttgagctacatatcaaagagcactctctgaagtgtcttcaaagcagattagataaagtatttggttctcttaccatatatatatatatatatatatatatatatatatatatatatatatccagtgtgaagatgcatcctgctctatgcttagttcaagtttacagagttttgctttcatcattccataaaataacgttgtatgtggcccagatatggggtgcgttcccaggcagaacttgagggtgaagtgcatgtagggaacttttgaaaggcagacaaatctaggcagtagcctagaaggaaatgttcagtgagaaatgtggcagattacaatctgggccctaaagtgtcagtctatgagagactactcaagtatccctccctattcagacccagtatcgtgaaaaagaccatgtgtgggtactatgatcaaagccaaatgtgggactctagagaagtttttgctgccagatgtcttgaatgtgccactaggatgaccctgtgctctctagaaacaatgccaaggaattcatgagttgtgctgggagcagtgcccacccagttcagatgctgctgaggctgacaagttagccatcaaagagacatatttattactcagaagaatctgaaaatgaaccatgtgagtgacttacacatttgatttgtgggtatcttgactatcagatcagttcttccatagctcaggaagccaccccattctctcccatctgtgcacagcaaactaaactctctgggaacctgtagaagttctctggggtccatgtagtgatcattaattttcactgctgacttgattggatttagaatcaccatggaaacaaacctatttgtgtctataagggcaattccaaaaagatttaattgaagagggaaaacttaccctgaatgtgggtgacactatctcatggtcagaatcccaaactgaatacaaagagaaggtgaatggagtttttatctctctttgcttcctgactgtggctataaggcagctggttacccaccccacccttctgcagtcatgacttcctcctatgttggactgtgctctcaaactgggatctaaaataaaccctcttgctctaaaatatgaactcatatgtctaactaggaacattttttatgttgtatacatatttctctaaccaagaaagaaaatacattattcttaatcaacagtcctaaaaattgttccaaaaatattttgaagcttcatatagcagtggataacaaattttgaacatccaaatgaaaaaggaacatgtgaagcatagatggagttaatgaaaagcatttggaaaaattctgtattttctagggttctcactactgaaaatgtatttatgtgaaacaatgttattaagaactggttttattgactagggttgacaaatatcactataacagcttttggaaaatggagcacatatagaaaattaggatatgttgattagtattatagacaccaatcctccagattttttcttgttaatgttttctttgttttttgttattaaaacagttttaattgttttgtaattttttattagttcaaattaggaacaagcttgtttcacatgtcaatcccttccccctctccctctccctcccctcccctacccccactccatcccttctccttcctcctgactaccccccagccccatccaccctccactccccaggcagggtagggccctcgatgggggctccccaaagtccaacacatcatcctgggctgggcctaggccctcccccatgtgtccagggtgagagtgcatctcttcacgtgggatgggctctcaaagtcccttcttacaccagggaaaaaatactaatccactaccagggccctcctagagtgcagaggcctcctcattgacattcatgttcaggggtctggatcagtcttgtgatggcctcccagacagcagtctggggtccatgtgctcccccttgtacaggccagctgtttctgtgggtttcaccagcctggtaccgacccctttgatcctcattcctccctctctgcaactaagttccagagttcatttcagtgtatatctgtgggtgtctgcctctgcttccatcagccactggataaggactctataatggcataaaaagtagtcatcagtctcattataggggaagggcatttaggttatcctcttcaccattgcctatcttgtcagttcgtgtcatccttgtaggtctctggaaatctccctagtgccagatctctcctcggacctataatggctccctctaatatggtatctctcatcctgatctcctctattcttcacccaactcaatatttctgctcctccatttcctcttcagtctacctcaagatccagtaattcctctcttgggcatatacccgaataatgcatgtccatacaacaaggacatttgttcagccatgttcataacagcattgttgtaatagccagaacctggctgcaacctagatgcccctcaaatgaaaaatggatagagaaaatgtggtacatttacacaatggaatactactcagcagataaaagcaatggaatcttgaaatgcgcaggcaatggatggaactagaagaaaccatcctgagtgaggtaacccagtcaaaaaagataaacatggtatgtactcactcatatatgaattttagacatagtgcaaaggattaccagcctacaatcctcttcaccaaagaaactaggaaacaagaagaactctaagggaaaaatgcatggaccccaggaatgggaaggggcaggaattcctgagctaattgggagcatgagggtaggggggagggagctgccagaatgagaggagaaaaggagaggagaggcggaaatcctccagatttttagaaacaggattattgaaaactaaaagtctttcaactctgaagttttcaaattttcattgatacaacacacatacatgatagtacaaatgtacctattataaaattattaatccacctcatccttattatcttatttttatagaaaatcccttcagggtaggcttcaattcttcccttttattgccagactactaaaacctttgtttgctaagtctctgtgattatttaacatgtaaaactgaagagtatataagaaagtccatcaatatagcagtcaactcactagtatttaacatcactattttaaatatacattttgagttgaaacttgattccataaattgaattagggaagtttactcaactcaagctaacatccatgaaagaaaagatacacaaattattcttaggacgcaattaaaggaagactttgctgtattagaaggtgattttgcaagaactagtagtttgccaatatccacagaggaagaacataaatctaataattccaaatggatatagtcaaaaactttatttgatcaatttttttaaagagagtgatagctagagattgtgcaaaaaaacatatcaacaacagtttcaggagccattagtaaaatgccaacattatatgattacaaaatgactactgaataaattttattaaaacacctaataatactaagtctggggggagcatggaatgaccaaatctcttgctctgctggagggactgtaaaatattttagtcactatagaaactacctgttataacattaaacatatgcttaattgttgcttcagaaacccaatccaaggtatttttccaagagaagtgaaaatttatgtttatccccaagcttgtaacaaaatagttacaataacccagtttataaaactggaaaaaagtctgaatgtttggcaaccatataaactgatgtaacactcatgttacattcagcaatgaaaatgaatgaattgccagtacacagaacaacatgtgtaaagctaagatgcagagaaagaagtcaaaggatacatgactcttacttctgttttatgttgacattttgaagaagggaaaagcacaataatagaaatataagctttcaaaggtaaaacatgttagtgttttggttttaaaggacacatttagagaatttgtggaagggtggccaacagtgaacacgtccacattgcttttacctcatcagtaccattgggtgacctccacacgggccgtgatccctctgaccctcaacttccttcaatacaaattaaaggggagtattggctttctccagtttcagcctcctgctcatataatttcactgaatgacgaagggctttgctgtcaatattttcagctacagttgacagcttccacccacccaactgaggtcctggcagtttggggcagttatcagggtaataatgaggtatgatgtcaggtgacaatggtggaaacaaggcagctcttctagcatgctgtttgtagccactttactgttttcgagactcttagagtcggtattggactttgcccatgggtcttgatatgaacagattctgcagaacactgctgtaaccatgctagtgtatgtggggaagttgtagcagaagtaaacagcattcttacagggtgggagcaaattgttcatataaatatcttgttctgagtgatttctctgctgtgtttacctgatcgattaagccagagagaaggtgctaaaagcctggacattttgtctggaagttgacgattttagatgtcctgaatgaaacaatctgatctgtgtactccatctgtgtgcttcacctggctcaccagtccctgtgtttacccaaggaaaacatatgaccaaattctgctctcttgctcctaaaacccataagggttctcttcctcctgccactcattatggattcgaagatggttagatctcaccagtatctatacagatatctctatgttcaaagcaaaataaaattgggtgtgaagttagcattgctctgcccttaatgttgactggagatccaaagtaaaattaaaatagctaacagggaaataaaatttaaaaaatgaactgtttttggaaacaaggctggccctacaactcatggtaatcctcctgcctcagccacctggggcctgtatcaaaagggctcaaattttacattttactttctaaggttttttttttttttttctgtaagactttgactggcatcagaaggaagagaaacaatgttctcagttttttagtccaactcagacccttcccctggcctgagtatagttggtcccattttgctttatagtcctctactgtgaagattcctgctactaagttcattattggtatcaatgtactctctacctataccattctgccccaggcttggtaattgctgcagtctcaaccatctcagtgaagcacatggaaaaggtgctggtgacagttctcattgtgactactcatgagactgttgacaagcctggggctggcatatttcaattctattttgttgatacaacaattcaatggaaatcagctctgtccctatgatgttttctgttaccatacagatgctcagaagagagtgaggcctctttgctgaccagggaaacccaaccaatgggaaggatgcatgcaatgtcttagagacttaactagcctgatctgtagagcaagctgatgtgtgactgaccacatgctgatctacacatatgggttaccatcatcagaagttttcaaagcagcagggaatgccatggcattcttggatcttgattttaattagaaaactctaacgatgtcataatagagggaaacttcataacagtaaagactatcaattattatgataataagcaaatgaaattatcagtgttttacatatttttccccaggacaaatctcagtcctcaatattattcagttaatggaaggaacactagctaagtgactttctccctttacctgtttacaagttttattttcatggcagatgtcctacctatatctcagaaacacatgaattcgtctcttacctccacctggcacaatgaggtcccttctctttcttggacttattctgttgaaatctgtctactttatcaagaaagactgttagacctattacgaaagccttctcagtgagatttatctactgcagtatttccctctagtaattagggaaataaacatgatttccccatggctttaattaatggaacgctcctttgatattttctcatgagtttttcttagtgtcagacatttcaaagagtttcaatgtagtatacagctttccactgatacatacatatacaatatataaataaatttctatattattatagtagatattacttaaaattattattagcaagaatagttatcaatagaattgggaactaaaatttttagtagtcaaatgtttcaaaagtacttaaatgtttcaaatcttatggagttttcctgaatatgtcataatttttacttgaataaagttgctgactctaaacaatattttgaaaatgtttactttgttaaaatttttccttaatcgccgattctaaatagagacaattgtctcccattttagctcacacctacttaagtaagcacctttgaaagttctggatttcagcatactgtgaggatgccagactcattatgcatttcaaaaacagcaaaatataaccccttcctatatctaatattcgtgaaaggtgaattgacaccttttcccatcaaaggatgaaagctccctccttccataagtccccttgacttaggctggccagtgtggtataaaagggaggctgtgtgccacctctcagacaagctctccagagaccttgcacacttatatactgctaccctacctagtcccaatttcaggcagttgttgctttcttcttcctcttctttttcttcttcttcctcttctgcgtcctcttctaattattcttttctcctccttccttgttagtccactaggtcaaattactgctgaccctaatataagactatgtggctgtggattggagcaagtaaagcctaccagtggtcacattgtcaaagaaactattcttccctcccccaggagctaccaatgtcccataattcctcagcaaagtatggggcctagaaggaccccctacctactcaggaatttaggctagcttgttcgtgttctggtcttatgtaggcaagcacggctgctgtgagttcattagtttagaagtcaaaagagaactctcctttctctggccttttcattctttcctcctcctctcacagaatgtcagggatgctagcctaagaatataatttcttgctaaatttattctttgctgccatagatatattagattaaatctaatatctgaaattaggcactcattatatccacccactttcatttcatgactcttcctgtgccttgtccacacacattagcccttggttcatatggtttatgcagttgtttccaaattaagagcattggcaaaaatggttcatcttaccaaattttcctggcttattcctcatcaagtctttaattttgaaatcatttattcaaacaacacttctttgtctactaattctattaattcttttgaattaattactaattattctattactaattattctagaaatgattataccatttggatatcatactggcatggccaaagagtttgtatctccttcactacatttaagttactatattaaatataaaaggatatcctttatggtcaataattttagttctttcaaaagtttaaaataaaaactgttatatttcagtccatggattatcatcattagagacccaatttaattttattttcaaatttaggagaaaactctattactttatggtgacatcagcttaaaaatgattttaggggtcatggataccactcaacaacagagcatttgtcttgtgtgtgtgtaaggcttagggtttgaatcccaggattgcaaaaataagaaaaggtatttctaacaaaatagaataggaaaaggacaaaagatgaaatgccacatgggaaacataaaatttttttataatttttcatttgatagaaacaatagataggcatatgcctttatgtttaaattatgattagaatttctctttattggaagaaataatcaatcatttaataatcatttttcctcttattgacagtagattcttctcacattgttaattgttctttatttttgagaattaatgcatgtacacaatgaaatatgataacatccatcttctctgtcttccctcaactccttgtattcctaaattgtttattcatcagacttacactccatgtacaaacagcagccatcaactgtcaagtgtgctcaaatcttctccttttccttttctcaatggagtagtttgcttcatctctatgacatctgtatctctgtctctactttcttcctcttgttcacataaacatacacacacttcaactagaggtgaggccctgagagattttcctatctattttggaatgccaactgttgttggacttgtcccagttttgtttagttagcctttttgttgaggttttatgggtatagccttcctgtcataggtagaagacacaatttcatatcttcatggtcttctggctgcacttatcatatttctgctagtcaaactgtatacagttttttttttttcttttaagtcatacaggtttaatgtcatggagtgtttcctctgcactcactgacatagctataggtttgtacctttaatcagttaatattcactaagttgatatgaattgaactttaagaataaccaaatttaactgtcatttgtacctgcaggaagagggggaaaatcagttttctccagtggagcaatattggttatagctcccatagaacagatctctatagtgggaaattaccaatacggagtcaggtagaaatataagggtatttaatagggaaaagccttacttacagagcgacctagccagctggtgtggtagcagtctgtacagcaagaagcaaagtgaaagcgaaagtgcaaatgcagtcacactatgtcactttgaccatgccctcacaagcttggtcaggcacacctgtagccagcccctaagtaggcgtggctacagcttccctacaattccccttttagtctaaaagaggattaaaacttaacagtttaaagtatccaaaatgaacaatcataaaggtaaaatataagaagatacaacaatctgcttatgtcacatcctaactatctattttaactaaaccctaaagtcatctgaaagaggtagccaagcctgaacatctgtagatgagcaacatggaccacacagtttttggtgtgtgcttttatttggttacagtttggtggttttgtttttatgtgatgtgttttgttttctaggtttgtggtgtttgtggtaatttgactataattagctcccatatgctcagacaggtgtggccttgttggaggaagcatgtcaccttggggataggtcatctttgctcaagcactcaatgtagagtcagtctacttctgttaactgcagatcaagatggaggactctcagatctttctccagcaccatgtctgcctgcatgctgccatgttccaccatgatgataatggactgaatttctgaactgtaacccattccagttaagtgttttcctttgtaagtgttgctatggtcatggtgtctcttcacagcaatagaaaccataactaagacattgttgtacaggatttttgttttgtttttaagaattaacttgaagttgaataagtagggaggaagataggttctgaaacacttgaaggagggggaatatcatgatcaaaatacacttaaatttaaaaattctctaaaactcaaaaactacatagctgccacatatatgtagagggcctagatctgtcccatgcaggctccctggttgttagttcagactctgtgagttccaatgagtgagattagttgtttctgtgggttttcttgtaatatccttgagtcctctggttcctacaacccttcctccctctcttcagcaggattcctcaagctcagtctaatatttgaccttggttctctgcatctgtttccatccactactggttgaaggctgtctgatgacaactgaggtagtcactaatctgatcacaggagatactaagttcaggctatgtatctactattgctaggaatcttagctgtgctcatttttgtagatttctgggagcttcccttgcatcaggtttcttcctgacccagaaatgcaccccatttccattggtctacttgtaagacctccatcaatgggagcaggtactgttcctaacacattggctggctcttggggacctgtttcttaagctgggttaccttgcccagccttaatatgaggagagaaacttagttttacaacaatttgatatgccatgctttgttgatactcattggaagcctgcccctttctgaaaagaaacagaaaaggaattgatggggggatcagatgggatgtggggggagggaatgagaggagatgaaggaggaaaaaagacagttggagtggaaaatgaataaaaaaccaaccaagcaaaaaataataaccaaacttacaaattagtatcaatttatcaggaatgcacattttgaaatttttaaatacatatatgtatataggtgatgaaggaaatagaaatgcatgtgaaaccaagaggaaagctgttttctgaatgggtctactttaatgtatgtcttctccatttactggtgatcctgaatgatagactttgtggtcacaggagaatccatgggaatggccctgggggatcattcattaccatgtgacattttccccttaatttgttccttagaggggaagctcaggatgcttcctttagatactgcatcatctaaagtgtaactcccaagaaagactatctttccattctatgtagtcccccaagaaatgttcagatacatctatatactcaccaggatatatagaagtgaccctggctgcagcgagtctaaggagtgctctgtggcctcagacagggtaagttgtgcagaccactactaaaattcaacattcagtgagacttctgctctttacctgctcttttctgcataccctctactcttcagaaaccatctgtttcttcagagagtaaaagcctgtgtctttggagattcattacattagtaaaaaatttcagttatgatatatgaaatgcaaaaaatttctagaaggaacagaggtcagggaacttaggaagatgttgatatctgaagtctattggctcaaataattatagccttttagggagtcaaagatcaaagtaatgtttttgtttaatcactaaacactaaatcaggcctctttactgtaaaaataatatttggagggcatcctctttatattctgctagctatctataattccacaaatcattttgtatcttttagtgttttagaaggaagtatacttttgttgacttttctatagttcttaaacctttaggaggatttggcacgtatcagagaatcttgattgtcagatgaaaaaaatgtgtcaatgacaaataatgagacagcttactgaagagagaaaccccaggcctagagcaacaaagcgatcatgttgttggatttctctgaaatgcttgtcactagacgttcttatcctttctcacagctctgccatccactgctctgcatattctgctcatcattcttcagatgagaaattatacacaaaggcaggacagagaattgaatactttagtcagagggtacttccaggagctcacatctttccacaacctctgcttgttcacatcttttgcccttgtaggttctgctcttcaactgagcaccattgtttgtttatttcaaagcttgtttctcttttcttcctccctcaaatcttggcacacagaaccagagcatctactgtgaacaaattttcctaatctgcaaaaatttagtttaatttacttttgttctcctgaagaaaccacataaactgtgtcacccccaaaccaggatagctgtaatgataaatatagagattattaagtagaaggttatggacttctaggacaaacaatcttgaatttcaaactactgctttgaatcattgctatattaatttgaaacagttatttccctttatttgttccagtttctctattgtgcaacattaaccattaatctatcataagtaggaacacattatgtaacatatataaagcaaatgcttgtagccagaattattatcattgcgcaagaattaattaatggcatcatttcatttcttgtgtgattcctgttaaggaggttttagtttatttgagggaaataatgctgaaatgtgaatattcaaaatgcaacaaaagatggactagctgtaaaaaggagaacaattgaagtgaggttagaaaagagaattttgttctggcagtggtaatcatgaagatttgcatgaacacggggacattgacactcaaacttttgataatagtagatccaaaaaataaaaaaatgaagttgccagaaataaaactacaagagagtggtctcaatttttacagaactactgattttcaggatagttggttccaaatttgtttggaactacattagagatgacgattgtgaagctcagataattctgagatttaccttgaatgctttgaaaaggaaaggagaggcaaaggtcacatttagggaaactcatctgcagaatgacttcttagatgctgaggtagtcaaggtgacagggagtgggtaaaaccttcaataattctaattggctgtgcaagaaatttgatggtctattatcccaacaagtaaatgctaatgtagttttgttgcagctaagatagccactattatgataggtatgactgttaaaactgagaatgatttctttccttctgctcttagatgatagtattagtaggggagggatgtgtatggggagtggctataggtttgtccagaactgactaattaggtaaaaggtaattccagagaaccttttagtttgagcaattgtcatatcaaccatgaagatgggagaaagaaaagctacagagaaagtggagattgtgaggaaaaggctgcacaattactacctgatgaacaacagacattccagtctaaagcaaagaaaccaaaaacccagaaactgatactccagtcaggctaagataaagtattggtggagagaaaattaaaaaagtaattaaactattgtcagaagtgttcctgataccttctttgtgctttacttaccccccccaaagaataggaaaatgaaatatttgaaaatcaaagtgcaacttttgagtttagccacataggagttgaggataagtgggggtaactctgaaaatagatgaatccccagaaaatattttctgagattaaacttccatgttatttatttttcttcacataaatctgtgacagtgaaagaaaagtcacttagagattagactgtcttataaatgtttcaactgcttcagctatggaatgatatagcttagaaattgttctgactgactttttagggtctcattttcaacatgagtaactgaatacagaaaggaatctatgtgcaagcaacattacaattcctggaagttccttatgtcttttcttaccttcacagatgacccatttggtggccaaccagaatcaaactatggtgattgagtttgtcttctctgtattcccacctctgtacgaaggtggcctcctgtttttcattctcttgcttcttgtctatacattcatcatatcagggaacctagttatttttgttgttgtccagctggacatggccctgcacacacccatgtacttcttcatcagtgtgttgtccttcctggagatctggtataccacaactaccatccccaagatgctctccagcctagccagcgagaagaagaccatctccctagcgggctgcctcatgcagatgtactttttccactcattgggtatcacagaaggctgtgtcctgacagccatgtctattgacaggtatatagctatctgctatcctctccgttacccaaccatcatgacttctagactttgtatccaactaacagccgggtcctgcttctgtggcttccttctcgtacttcctgagattgcatggattgccactttgcctttctgtggctccaacaagatccatcagatcttctgtgatttcacacctgtgctcagtttggcctgtacagatacatctctggtggtcattgtggatgtcatccatgcagtagagattctggcctctttccttgtaattgccctgtcctatatccggattattgtggtgattttggggatgccctcagcagaagggagacacaaggctttctctacttgtgctgcccaccttgctgttttcttgctgttttttggcagtgtggctgtcatgtatttgagattctctgccacctattcagtcttctgggacactgtaattgctgtcacttttgttatccttgccccatttctcaaccccatcatttatagtctaagaaacaaggaaatgaaagatgctattgggaggctctttcagcagaagagaaatggtggggttcagaaatagatctccattcccaatattaaaacccttctgggagtctgaaatctctctgttgcctttttgggcctcagatgatgctccttttctattgctgcagatacctgttctactgttaacaggcatgatgaactgtgcctctaggtcactgtggccacttgtttgcagagcatctaccagaatcatgacagctgaaaaatatgtgtggatactcctgcttaaagcacaagttgacataccaccacacactgtagtagtgtggttccttcccttctcttctgtgatttcatgtgttgataaggacaaagattagggaatgagacacacaccacataaaataggtctggaaattgcagaggttgacattctctcttgcttttccagaagtagattcccctgtcatccatcattgctcaagtactgtttcctgacacaaaagacaatttgttttccactttcattcagcttatgtaattcaattagctacacactcagttcagcaaatttggactggctactgcaggatttgtttgttacaggatgtcaagctcaaagggttttgcaagagtaactgttgggtagcccattgtatttcctgttaccatttaaaaaattttctcacatataaactgccttacaatttaaacatccttaaataaacttgtcaaaatctccattatctaaatattgataaataaaatttggaagtaaagttcaaacttgttccatgagtttctgagtattagctaagtagtttataacaactgttttaaatcatttattttatgcctctctctctctctctctctctctctctctctctctctctctctctctctgtgtgtgtgtgtgtgtgtgtgcacaattgtacaggtatgggttaaccctaaaatgagagttagatcttcctgcttcagtgtcccccagaatgtaagagctttttgtttgtaatactacagatattccattctttttagttcaaattttttatatttgagaattttatacatgaatatggtttatataatatttctgaccttccctcccctctttcaacacctcctgtgtcacccccactcactctgaaattcttgacctcttccttcttttacacacacacacacacacacacacacacacacacacacacacacacacaaagtgtgtgcacacacacacaatccactgagtcaatttagtgttgcttttatgtatatgactttaggattgatgtcttggaattgaataacccatcatgatactcagtcctggagaaaaaacttattactatccccctcccagcagccattaactgcatgaagctcttcaccaaggggccgggacttagaagatttcctgcatccacattggtgtgtctgatttacaaaaccttcttgatgagatttgatggaagcagcttcactgtcatgtgtaggaaacaccatttcttgttaggtgtgcaattactatggttcttacaataattctgccttctctataatggacttgatctgctgcaaaatgaagcttctgtcatgaaatatgtgagctaaacatatccgaggctctaagcacaagcatttaaaatgcacttagactttatcatgccaaacatgccatttttaacaccctgtttatgaaaaaatgaggaaaaataagaaaagatgaaaagaaaattctgatattattggtgacagcatttccacaccactagatggcctctcgctcttttaagatagttggtaactgtttccagctttgtttttctcctcataggagctaggcaaaatcatttttctggagattttacattacttctgaaactcctggagtagttttgtaagaagaaagcagagaagtctgaataagacaccaaaatgtagaaaatttatgaagacagagaatggaggagcaaaccaaagctacaaaatagtgttaattatggtttttcaagacagggtttttctgtacttgtttgtttggaggctgtcctggaacttgctcagtagaccagactggcctcgaattcacagaggtccacctgcctctacttcctgactgttgggattaagacagtgagttattatgatggcatggcattttaatggaacatggcagaaggttgtaatactaccactattaaattatttttatttttatttgtgtgagaacaggtggtgtgtgtgtgtgtgtgtgtgtgtgtgtgtgtgtgtgtgtgtgtgtgcgcgcgcgcgtcccgcatgtatctgtgtgctctctgaggccagaggagagtgtcagatcccttggtgttatcttctaggggtttttaatgggttcattttctctgccagtcatggaattaaagggaaggagaaagtatccaatacttcagctgacagcaggtaaataacagacacaaagtagaaacaatgatgaaaaatacttttattaaaggtgaagaaatgcacatgcacacatacatgaatacacaaaaggtatacacatttacacatgcacacatgcgcacactcacatatagaaggtgcacgaacatatactcataaggtacacacatactcatacagactaggtgcacacatgcacacacgtgcgcacgcgcgcgcgcgcgcgcgcgcgcacacacacacacacacacacacaccatgtgcacacatacactcccacacacaagatgtgtacacaaacacacacacatacacacacatggcacacacagcaaagtacatagaaagaaagatcccctacaaagcagagtggggactctgcaagcaaagtcctttctctcctccacaactggaagttttatgtgtctttatgaggtgtgaggtgtcttcttcctccagttaatgtttggtcagtttgaacaaagactaagtactgaaagggccccagttttgaacaaacatttcccagtccgtgttctctggcagggggtgctgtatcagcagccccaggcctcaggtctcaaagaaccaggcctttttctcaagtcaggaagaagccagaatttcaccatctttgttatctatctgttgtcccttcccctttctgtctgcctatctagaatctgtctaactcctagtccttcataggaacaagccagagctacatgtcattgtgagttgtctgacatggatgcggagacacaaactccggtcctctgcaaaatgaatatgaactcttaaccacagagacatctacagtcccatttaaaaaaaaaataccaactatagctgtttaaatattttatgtttgtatttttttagcctcaaggcagtatactaaatctatttgatctttaatagcactagaatgtttgctatggaatcttgaaatcaacacgaagtcccacagaagagatgataacagcaaacaccagaatcagtgagtgtgtgtcacataatcataacattttatcactgactaactagcgagaatatagtgactttttttggataaacatcagggaatcatactcctttctcaagcccaaatcatcctagttatatggagtttgttaatgttttataaatgtctatataaataaacaaccaattctaagaacagagtgagggtacacaatggaagcatttaaatgtgcccactacaaatgctattattccttagatcatgatccttagttggctaggaaaagatggtattgcaatatttgtgatttcaaaataagaagaacctgttgataatatgaatagtgcaagtgacttcctttctcaggacaaacaatggtcaacttattagaaaacgggaaagaaacacaaccaagaccatgaaaaacattttgcattgcaatcttatgttttttttttttttgctttaaaagcatatatagaacatgatatatctttgaagaggcatgggtaaactcacattagctcccagagatagtgaatatcttttgagaacagaatattttcttaatggcatctttcatatctttgttcctcaggctatagattataggattgaaaaacggggcaaggacagcaaacattagtgcgatgatcttctccagtagtggctggaaagtgacagagaagcgcaggtacatgagagccacactgccaaaaaacagcaagaaaatagtgatgtgggctgtgcacgtggagaatgccttctgacggctctcaccagatgggaacctcaggaccacagtgatgattcttaaataggaaagggtgatgatagagacacaggtcaggatggagatagcatggatgacatcttcaaccagaatcatagaggtgtcggtacatgctaagagaagtacaggttccaagtcacagaagagctggtggatgtgattggggccacagaagggcagggtagatatccacacaatctctgggaggagcatgaggaagccaaggatgaaggagcctgtggaaagctgcgtgcacagctgcggactgataatgattgcatagcggagtgggttacagatggcaacatacctgtcgatggccatgattgtgaggaccaagctttctgtgactccaaaggaatggaaaaaataaatctgtagcaggcaaccaatgaaggagatggttttctctgtgctgactaggttgtagagcattctgggaatggtcactgtggtgtagcaaatctccaggaaggaaaagatgctgatgaaactgtacatgggattgtgcaggtggacatccagctgcacagccaaaaagatcatggagtttccaacaacaatgaacatgtaaatacagagcagaaggatgaagaataagaggccaccactttcaagctgagggaaatcagaaaaataaaattctgtcacctttgtctgattctccttatccatatttttagcagttcattagctggctgaaagaataagtaccatcagaactcaagtaaaaggacaaatagacaaaatgtgaaccatctgaacagtttcaatattatgccaattatataaaatatatggtaaagtgatattgtcagatttgtaaattttttagtaagtgtgtctagttgccaattattctggtttattttgtttaaaggaacagctgcatatttagaaatacaagattgtatacactatagactgacaatttataaactgcctttaactacataatttaagggaaattattttctataaatatgatttacagagacaatcagtatgatattaatttagttcaacccatcaccagtatgacaagcaaaactgctgtgcctgcagaaaagcaaacataaatgtgtgctgtcaagaaccagccatccatggaaaataatttttggtgtaaaattagtctaccaagatctgataaaaacagttcaagtgtacatacatcaggcccatgatccttcagtcctgtgcttctttctgataagaggatccatcaccgaatttcaacagatagctacccccttttcctgtgagacttttgtgactcattgtctttgacaaaaaatttcattcattctattaatctaaagctggaaaaagtaagtgctaacaacagttttagtagcatcttttatgattacttactaaaatactttgcatgatggaagtctaagctgtgtcttttgtcaaattcaactgcttgacagtgagaggtctgaagactggcctggcaaaagagaaagtgactgatagctaccccaaagagtcaatcatctgggagctgactttagacacagtacatatactcccttgaaactattaaataagcatccatacacaaaggagaatgaaccaaagatttggcttgctttctaggaattttgtaaaacattaaatctgcagttaacataagaaatgtgaagaataaaatttctgttggtatttcttcacgaaaacctttactttaaaaattgaggctcacagtaaaaataatctaccttctaattttttctgttttttatactcttacccagattcgttgcctttaaatatgtcttggccaagttggattcctcatgtaactgaggcaagatttcttaaatgaaaaagtgtgggtatgctccctggggagcagaaagaggatgggatagggggttggtgggggacaggggagtaggagagtaggggagggagagggaactgggattgatatgtaaaccaagcttgtttctaatttaattttaaaaaaggaaaaaaaaagtgtggatatgctaaaatcttacacaggaaagggctgtagaagacttcaaagcttacttctacccctgaaaaataatgtgaatagctgtagtgttcttaaaacaatttcaacagctacatcctttgcatttatggtctgctattcttcactggtctgcaatgacatgatacatatataattgtgcagtgagtcaaaatactctatcaatagtacacttcacggacacaaaattgaaaccaggaagaaggagaaaggaaaaattacataaaaaagtactcctgcatttcctgggggaagtaacaacctgaaactcaactagtatgctactgtcattgacggggatttctttattcctaggtgtctttcctggctctgctatatgacacataggcatcttagattataattgaacccaggatgctgtagcaatgagaaatgccatagatatagtgtcacagatgaaatttaatagatcatttctcaacatatttgttgtgcttttctgtagtcaaagaatacaatgaacctcccaaagcccctatacctgagctacagctccctacctcctgtttgcatgacctcagcaatgactctgtgggccttttcatcttacactcaccttttccagagtccccctttcctcaaatctcttggtttctttgcagctccacaaataggaaggttataaccccagcactaggtttcttgggggataagcagttgagaaaggcttcattttggcacactttattcagtgcctagggaaaagctactcataccccaagtgcctaattagggaattctgctgcacacttccgtttcacaaagactccatacctatgggaagctaagagtttaagtcatgctagatagtagaagaaaggcaatacttggtttgcttttctgtataagctatgaaagaaattgtttctgttacacaatatcagacagacttaatcaggggattggggtgatgtcttgcttgtacaaataaagcctgtctggataacagagaatggagcctgccactagctaaccatagtggtctggaggtgtgtaaagacagacaggaagtgagatgactaggtggaaacaggaagggagatgtctctgtcaaagaattgacagagtttatattatatccttctgaggtctttgatggagttgaagacagataattaaggttagtgttttcttagttatgataaaaggtaagttacatataaaacttaaagaaaggatagatgatggaatattttcttaaattttgccaagtgttagtggattaaatattggtaactatagttcttgcttgataactcttttgttttactatgttaaagttaaaaccttgctttttatttagacagaaaagacgagatgatgggggatatccttctgtatgctgtgaatatatgtttctcttataggttgatgaattaagctgatttggtcaatggacaggcaggatttagccagataggatattcaaacaaggatagacaaaggtagtaagtggagtcaaggagataccatgttgctgctgcggcccgaacatcactggcaagttaagtctacaaggagataaacagattaacagaaagggttaataattaagagaaatgaattaggaacaaaagaaacaaagctcacagtctgtggctcaaagtccaaattctcgaatgcatttgcataagccattaaaacagcttgcaagaagagcacagttttgaagcatatgaaagagttgtaacttcagtagaacttcttcaaaaagattctgagaaccatggggacattagcagagaagtaaggttgtcacattttagtgaccccccaaatttctctgtaggcttgactgaggaaaagagtcaaggacaatgtttccttctacaccaaaggaacattgataagtacatcgaggaagtccatagagacattggaaaagtccctcatataatgggtagaaaacataattagaggaatatatttgctctttttattctttttgtctttttaaaaactaaatttggaactaatatgtacagaaggatattgctggagggatatcaaatgaataactcagtaatattttcttctcttatgaaaatgtatatgcaacagtaataaaaggttaaacattaatgtactggtagcagagggaataggtagggaactgcatttgaaaacatattttttaaatgtcttgcatatgatgtttatttagacttgaacagatctttatcttttacatggtctgatagcgcttaagtttcaacacattgattcctgcccattaattggttagataacaggtctcattccattttgtacaaggtaattctagttatgctttaagacacatatatgaccatgtgtatgaaatcacaaccaagagaaagccttgtgccttttatgcaggaaaacatatttttaattaaaaaacaggttacgaggatttatgaaacaaaaagaaactctgagaacagagatagctattaaaaccaagtacttagatttttaaaagtttgtgtcttatcaagaacccctgtatgcatttgatgggtaagtgaactaagtttagaacttgtgtagtgaccaaaggcaaccacactctgcctttatcacagcttttccccagggagtctcaccatctgcttgtgttctgaggcttgtgtctcttcccatgcagagatggtgcttctgcaggtgtcttgcttatatgtggacccctaagcatctgctctctactagtgagtctgcccagttataagaacatgaggtatgctcaccttgaggataggctgtccactactcactgttgttttggggcgttaaatgctgtgtttctactccctttctttgttttctcagctaggtagtttgcttcatctctacattctgtcccttgctcaatggacctacacctcacttaaaaagtggaacattcccattaactttgaatccatttttctctcattttgtatttttcactaatgtaagcttttcatttttcgactaagcatgtttgcacaattagaaaaagtatgctttgccttatctttatataggatcatacattagtcataattttacaattgattatttattcaacattatctttgtgaattatttatgctattacatttagctccagctttgaaataaaagtactactgagtcctgccagggaagcaggttggctgactgaagatcttcacctttccttctgctcctccagatccaatcccccagtctcatcccaggctctacagcaaagcttctggagtgacctctcttcactttctgaccccattccaagcagatcctgaccccaaataagcagatcctggtggaaagtttcctttcctccttcctgtgaattccctcagatccctgacctatccccactcctaagtgccagctcttgatactgagaaccccaagtagccataggtttaaggtccacagaaaatttcctaccaggcaacacacaaccacaatgctccctaaaaaccagtgagaaaacagaaaccacagaacaaaacacatactcaacaaagataaaacaagatatcagccctgagaactataatcttcataatgctagatgattagactccagggtaaaaacacaaacaatagcaaggacaatatgtctccactaaagcccagcagtcctatcacatgatctaaatattccaacattgctgaagcacaagaagaaaatcttaaacagcctgtatagctatgacagaggtccttcaagaggaagttaataaattccttaaagatactcaggaaaaaaacaaagggacattagaagaaaatgaataaagccattcagttcctgataaatggaaatcgaattaataaagaaaacccaaagtgagggaatagtagaaaagacaaacatgggaattaaaacaggaactagagatgcaagattgaccaacagaatacaaaagatggaagatagaatctcgggtgttgacaatacaaatagaagaaacaatgaaaagaccaaatctaagaaaaataggaatagagggaaaaaaagaaatccacatcaaagttccagaaaatattttcattaaaatcataaaagaaaaatttgctaacctaaagaagatgcatacgtaagtacaagaagcatacagggcaccacatagattggaccagaagagaaagttccctcagtatataataatcaaaacactgaacatacacaacaaagaaagattattaaaaggtgcaaggagaaaaaacccacaagtaacatataaaatccagttgcagagaaggaggactgatgagcaaagaggtccataccaggctggtaaacccaaagaaacagctgacctgaacaagggagaactcttggtccccagactgaaaccagcatgggactgatccagacctcctgaatgtgggtgtcagtgaggagaccttagaaatctatggggcctcctgtagtggatcagtacttatcgctagcataggaatggactttgggagcccatcccacatggggggatactccctgagccaagacacaagggggttggcctaggctctatcccaaagcatatgacagattttgaagaccccctatggaaggcctcaccctccttggggagcagaaagggtatgggataggtagggtattagttgggggccaggggaggaggggagggagagggacctgggattggcacgtaaaataattttctttctgtttaaaattaaaaaaaattaaaaagaagatacatatagaattacaagatgcaccacatagattggaccagaagagaaagttccttcagtaaataataatgaaaacactgaacatacagaacaaagaaagaatattaaaagcttcaagggaaaaaacccacaagtaacatataaaggcagacctacgagaatttcacctgacttctcaatggagaccccaaaagacacaaggacctgtatagatgtgcttcacactcaaagagactacaaatgccagctcagactattgtaccaagcagaagttttgatcaccatagatggataacataagacattccatgacaagaactaaatttaagcaatatctgtctacaaattaattgcgtcctacagaaggtactagaaggaaaatgccaatgtaaggaggttaactacaccaatgaaaacaaagggaataaataatcagaccagccaaataaaaagatggaaagcacacacaccatgaccaccagcagcagcagcaattagtaacagaaatccacaactattggtctttgatagctttcatcaccatcagtctcaattacccaataaaaagacacagacaaatataatggatgtgaaaacagcacctaccattctgctgcatgcaggaaacacaccccaacatcaagaatagacattacattaaggtaaagggttggaaaaagatattccaggcaaatgaacctaagaagcaagttgctgtagccattctaatatttaagaaaataccaaaactaagtagaagaagataaaaaaggacacaagcctactactcggttaacccgacttcaccccaaccaagccacttccactcacaaggcccaacccatctccacatcctctcttctgctcaaacctgttctgaccatataagacttaaaactaacagaagtcatctacatgcccagatccaaccaggtaaatatcattatgaaatatcaagccggtactatctctccaaatcttatcaactccatagaagtgtttaacaatgaggattacctagatgaacccaggacacaaaattgaaaagaagaatgataaacttcatcaaataattcaaggtatttaaagaagacacaaagaaacagtccaatgaaatcaagaggcttctcatgactggagttggattttatgcctgttctttcattcttagagcaagcattgtcagcacagagagaaaacatttatcctataaatgtatttattcatagacttacttgtgttaaattttttagacaaatgctgcatatatacaagcaacattatatagattgagctggttatatttaaaaatatacctgaatatgcatatatgtatataacaacactcaataaaacataggccatgcatttgaaaaatgagcatgggtatatgggagtgtttagagtgagaaagaggaaaggagaaattacataattatgttgtaatcctccaaacaaaagaaaacaatctgttactgttaatgcttccctattgctattccaccatggattcccatcatatatccttcctcaaatactgtttcttgacacaagaaaaaaggtttctccttattaagcttatttgatgtgcaaccatagactggccacagcatgatttatatatctgtgcacctgtttatggagatataagaaataactgagtcccctggaactggagtgtcaggcagttgtgagtcatttgatgtggtactgggacctaaactccagtcctcttcgagagcagaaagaacattcaaatggtgaaccacctcttcagtcccctagaagcttgcttattgtcaaggtttgatcctccaatcacaaaacaatattcagatgcataaacatttcttaatactggccagtaagttaattcccactttctaatagttatgttacaggaaatggctagttaaaataattagtaaaatatagacctgtttcttgactataccccagctcttgcacttttacactttataagggatgctggtgtttaggaccactaacaatgacacagatgactcacaggacagacaacaacatactccatccttctcacgagggtgcttttctgactggtttattcctttcttttgagacacatttttgttacatacatatgaactaaatgttattatattatacatgttcaaaataatgtaattctaaatcctagaataaagatgaaccagttggattaaagttattaaaactaagaaaatattttttttctagaatccatatgctagaaactatgtatcaggatttgaggatttttgttttaattatcaaaagagtctcacaagaaagcattatataataaaattgagattcaaagagattggcttaccttaccaataccaagtaattgataagtcattcaataagctacaactcagactcagatttgtggaatttcaaacacatgcccaggagactgatgttttctataggagaaaattgttaagtaatctaagaaacatttatttttgatccaaatttcatttgacaaatatcagtgtttaggatacaattaaataatttatgttaaatcaagtaacctcaaacctacatgtattaggtaagaaatatatttggcaaaatttctaagtatgattcacaaatatctgaggttaggaaatcaccctatgatgctgacagaatgtgtacactttgcagtctctggggtcaagatgtgtgtggctccagcaggtattgtaatggctctgataacaccaacgaccagcagcccttgcctctccttcaatacttgacatagtgaagaatgagaggctttatttctcctctctgactcttgatcatccctcagccatcatcaaatctgtccttgaccttcattctgccacccatcacgccagcatccctgctctcatcagctgcctctttagggcttccttgatttccttgttgcgcaaactgtagatgaaggggttaaggaaaggggtaaccacagagtagactactgccaaggctcggtcatagtcaagggagtaacttttcttcagccgcacatacatgaagaggatgctgccatagaagatgagaaccacagtgaggtgggaggcacatgtagagaaggccttcttcttgccagcagcagaaggaatcctgagcactgtgcggattatctgcaggtaggagctgagaatcagcaggaatgtggccaggatcttgcaggagtttacaataaaatctaccaggacattgactgatgtgtcagtacaagccaagctcagcacaggcgggaagtcacaaaagatgtgttgaatatgattggggccacagaaaggaagacgggacaccaaggaaatttccaccactggcccagccaagcctcccaaccagcagcctatagcaatcttggtacagagtgtctgggtcatgagggtgggatagtggaggggcttgcagatggctaggtacctgtcatatgccattgctgtcaggaggtagcactcagtagctccaagagagtgaaagaaatagatctgcaggaggcatccagaaaaggaaattgtcttcttctcactgagcaagttcgccagcatcttagggatggtggcagctgtgtagccaagctccaagatagaaagaatgctgacaaacttatacatgggtgtgtggagtcgagagtccatgtggaccaccaagaatatcagtaggtttcctagtattgtagtgaggtaaatggcaagcaataagaaaaagaggtaagtctggacaccttggaggtgagggaagcccaaaatgatgaattctgttaccttgctccagtttccagtttccattgctcatcattcgtgtacctagaggtgagatctagaagagataagggggaaagcagtcattggcatcccatcaaggaaactttcaatagctccctctgactgctaaacttccccaattacaaaagcagccgttggcatcctgtcaagaaaacctccaatacctcctcctgaccctagaataaacttcccctagcagaggcaagagtttcatttcctcccctgccaactcctccaatcttcagaacctcttcccaaaaattagaactaaacttcccttttctgagcagcacaagcgatctttggtcccacatcccacctataacccatttgtctttcttactgtaggctccagaaatttgagtgttccttattcatggtatatgtcaccattgtataatgctcatcagatgtgttaagagcatcacttacactgggaagtaccgatagggagccacaccaaggatatgtaattcacatcacattccctgctttctaccttatacttgtttgcttcatcaagattttggctcttgaaacactgatttttttcactacaccttcctacattctctcaggaaaacagatttaacatcatctatcctcaagcatatcagttagaattttaggcctcttttgcacactggtaaaaatcacagtagagactaagacagtttaagcaaatgaaggcgactcatacagactggaagcaaaccctacatctctttctctcctccacaatggccacttcctcagtcctccctatccccagtcttaaaagtacctctcttattcattgggatgcagataatgaatatttatggttaatataactagataccattgaatattttctaaacattataactagggacagactcagggaataaataaaatataatggccaacgctaagaaactaccgttcctttctttttgtgttttatttcttactttagttgttgcctacaattatatgtatttgtcatgtgtgtgctataaagtgaagaaggattggtcacagctagttaacataagtattgtgtcaagtagctgtcactgtgtggtgaaaacacttggtatccgttctctttgaattttttaaaaatgcagtgaaatgggatgttgagatggctcagtgggtaaatagacttggtgccaagcctaaagatttgagtttgattcagggtcctacacgatagaagaagagaagtgactcctaaaagttgtcctttgacctctacacccttacgatggtgcacatgtgaacacacacaaacacaaatatgattttaaaaaatacactgttgttaactaaactcaccctgttgcccaaagagtttaatattccaattgaggaaataaaaataagtacaacacttgctcagattagtctataattatataaatatggcattaatcttacttactaaacttgctaaacaagcatgtacacatgctacctgcatatgactgcatccacacacacacacacacacacacacacacacacacacacacaccctcaaccctcccagttcataatacttatataataatcataaatttgacccttatcttcactcactttttcacatcccactcaacatagtaaaaaaaaaagaaaggatttagggttttcttcttatactgtttatttaaatatatttgatcatttctacttaattgatcatttctatttctaataaacattgatgcaatgttggaagacactcagaagctcaaggaccatcataaattttaatttcactgaagtgtttgaattttaaatataccatctattcctatcaattcagaatgataaaagagctttcaacaccttctaaaggaaggaaggatgaaaacagtagcataaaccattcataccaaatgcaacatcaccttgggctgacttggaccagcaaagactcttattctcttatgcaggaagaaacctgtgtcctcaaaatctcccagagatgggtatcaaacccctgccagcactgatggtgccaggtggccacacaacagccttctctatcatagaaacgcttagataagattcttccttccattgacatgaaatctggctttcaatcattttgactgcgagtagtgcttttcaacattatcagcaccctcatcttcatcaatatcatcatagtttcactgccagtggctgcctgcctttattattgactcgtctgtttgtagtgttccctcgttaatactgcctcattgtaaaaatcctgaagatacctaaacctcaatttaccccaagttcacttctttttgtggctatccagggtaaaatttacttttcctgctacccctattagtcacacgctgggaaaatgtctcagtggacaagaactctttacaagcttgagatcctgagtttggatgtccagaatatacacgaaaagctgagcttggctgcttgtgtctgttaccccatcgatggcagacaaagacagggggttcccaagagttcattaactattcaccctagcttcagtgctgaaatttcagtttagtgacattgatttaagagagtgatagaaaacacccaacatcccaggatcctgttctggcctcatgctcatctgcatgcacacgcacacacacacacacacacacacacacacacacacacacacagagagatgagagaatgacagaagcagagagaagtccagtcgtacttcctcactgtccttttattccatagtacttcaggtactggaattattcctatccatatattttaccatacataagcagtactctttgggcctttaaaaagtgtttatttttaataattgtggttatatagaggtatgtgtttctgtacacacacacacacacacacacacacacacacacacacacacacacacacacatatatatatatatatatatatatatatatatatatatatatatatatgtcacatgagtgcaggtgtccacagaggccatgggtatcagatcctaagaagcaggagtaaggaacagtagtgaccacctaatgtaggtgctgggaacctaactcatgtcttctggaagaagagcaaggtttcttaactgctaatccacatctttatcgcctctgtaagctttctgaaatttacaaattccatactttagttaccacctagaaatcttggtacaacacctgatgtatcacagatgtgatggctgatgaaaaatatgtcaatcaaggtgattgtctgggactttcacaagggtcatctcttcctttggcatcagagctggagtgagggctattagaaaacctagcatatttacaatttagcatttatcttagttaggccatatctcacttctcatattccaaggttttagaattagtggcttacattctattctctaccccacacagttacattgcccctagcctatatctaatgagacttatgtccaaatagttgcaacttaagagatcaaccccttcgatttctccattttacaaagaaggaaatgggaatcaagaaggggaatatgccttgtcaaagatcacacacttgtttaaaagcatatcaaattgctaattctgagaagaagctcttcacagtaacatttataaaggagaatatacacctggcatgatggctcacccttgtaatcctggcatgttctggactataagtgtgagagcctatctcatgagagagagagagagagagagagagagagagagagagagagagagagagagagagagagagagaagagagtgcaatagcccaaaaagctattcaacaatattaactttgagttctacacaatatgaatatcctgtgaaccctaattgctcagcacacctcgtatttctgaatgttcttagtcttttcctaatgtccagcctacgaagaaacatgacgaagtgtctgcctgacagattcttacccacagcttgatagtgaggatcctttagggcgtggctcttgggccactgctgagtctatggctggaagaggactccctcatcactttctattccatttcttcgaagaatcatgtgtagccacttgcaggtgatacatgagttgagctttctcactttgagataacctgcaggagtaaatcaaaccatacaacgttcccctttcaggatctatattcttgattggaccgaggtctctgggccttcagagtagtcctcctgaggttgctaaggtgttccttggggaagggaactggcatccatgaagttcattacccaggagtcctttacctcctaccagctcagcttattgcagcaattactaccagtccaagttgcaacaagcctctcttactgcagtgttattcattagtgaaaacaattaccatcataaaactccaagaccaactggttagctgcattgcatgactttacagaaagaaatcacacacttcctcattacagcaggaccttcttacaatgtgattgagtttcttggtccgtgagatgatgaaaagaggtacaatctgagcacatagaaattaccaaggcaattcctaatcctgagtattagtaaaactacagtagttttacaccctctcttccaccagtacactccaatttcatattgccctgaaaatatatctaactctggattctggatttaaatctagctacaacttcaactatttttgtggtactaggtaattcattcactgtctaatttaaaactttccaaaagaatggtgtttacatatttattccataaaaattaagtgttagagatattgagtatcccattatatacacatgtatcaaaaaccacatttccatgtaaatacattcaattgttatttgtcggctgaatatatctgtaaaggagagatgtcattttacttatgctaagctaatatccaagtgtgataatgagtgtgaaaaatcatgaactctgagttgtgtgggaagacttatgtaggttttacattttccaatcaccaccacatttcaacgttcttaatataattttattctaccttttaacatcttacttgaagtttgcattctcacatttacttacaaaggttacttgtcttttgcttttcctaggtagatgttaaactggtgttgtcattttgttgatgtacttgtgatttatagtttttaaattattatataattataacatttctcctttccctttcttccttctgaattcttctgtacaacccccaccctccttctaatccattgactcttctttcattgttattacatgtggccttggaatttcatgaaagatttaagttagttttaacatattttgtaatacatcatggtcatgttctaggatgtttctagagtctcttcaagtacctgactaagacaattgaagattataaaaattgtatgttgtttcaagtcaatatatgtaggtcctcatcatctttccttacctccacccccaggcttacacctatgaatagttcctaggtctttcttaggtatgtaatgtgcttatcatacttaaaattttctctaagaggacctgaaagttatcagcatgaagtatcttaatctttctggagaagacagagtctaaatttagatacttgtcggctagccaacacaaatgacctaaatgcattttatattggctaatcacttgttgacttcttacttcccctaattacatgcaacatacaatatgaacactaatttttgaggtgccaaaagtacatgcaatggcaaatcccagtgaaagtaacaacttgattctatattcaaagaaataaatgaaacatattttaaaatcacatacttttgttaattttgttctttagatctgaattattcattcattatccattctactaaattgttaaccttttctttttcttattttaaatttgtttttattttatgtgtgtagatgttttacctgcatgtatgtctgtgcaccactggattagatgagaaaataagagccaactatctcttgtctctaagaaacatactttacaattaaatacattaaaaatgagagtcaaggaattaagattgacttacaaagaaatggaaattataaacaaactggtgtagcaattctattatccaataaagtagacctaaaatccatcagaagagacaaagaagggattacacatttgtaaaggggaaaattcactaaataatttaagaagtgtaagtatgtatatatccaatgctggggctcccaatttcataaaaatagacactaaaggtcaccaaatgtcatatatgtaatagtaggtgatgtagtatctatctttcatctttagatagttttacacaactaaagatcaagaaagaaacttcatagctaaattataccacagattgattggatataggagctatctatagaatatttcacacaatagttgggaagacacattcttttaagtgttacatggaaactactttaaaaccaatcacattataattaacaaactaaatcttttttcattcatttatttagctcataaataaagtcatgcataattatgatacacaatacagtatgttcacaatggcatggctaaattaaaccaattaacatgttatatcacacatattcatcatttttgttttgaggacacttaaagtatactatctcacaatttttaaaatatagcatattattatcaaccatatttatcatgctttgagtagacctcaagatttcacagagtccatgcctcttgtccaactgcagttttatatccttaaataaatcatttccccattgttaaaagacccacattgaagcctaatagccacaattctgctctctgttcccataagctcgtcatttctaggttacacataaaattgaaattgtgtgacatttgtcttccagtgtgtgtcacttattttttttgcaagcatataactttactacttactaaagatgaaatcaaatttgcatgcacaggtgagcactcactgaaacaccttggattcatcacatattttagtttcaattagcatacatatatataatatataatatataatatatatatacttaatggcaatatgttatgcatcaatagcagcaacagcttttccaggttctgcagtcatttgaacaaaattgtagaaacatccagcatactccatttaaaaagcaaaaaacaaaaaacaaaaacaaaaacaaaaacaaaaaaacaaacaaacaacaacaacaaaaaagtaaaaaacaaaatcccagaaaacagcacagttctgttactcttgtggtacttggcaccatttttttataattagcttctcagtcatcatctgggaggaaaccattctgagcaacatcattaaaaacagctctgataaagcatggtcactactatgcatcataaagcaggtccacatatgagtgagtacatatcatgtttgtctttttgtagttgggttacctcgctcagaatggtttcttcaagttccatccattttcctgtaaatttcaagattccattgtttatttctgctgagtagtactccactgtgtaaatgtaccacattttatctatccattcttcgcttgaggggcatctaggctgctttcagtttctggctattacaaataatgctgctatgaacatggttgaacatatgtccttgtcatatgaatgtgcttcttttgggtatatgcctaggagtggaattgctggatcttgtggtagactcattcccattttcctgagtagttaccataatggtttccacagtggctgtacaagttggccctcccaccagcagtggaggagtgttcccctttctctcctaacaaaccaaatcttaacaaatacaaaaatgagagtaataatttcttatatcatcatatcatgaggaaataaactagatatctatagagacagaaatgacatagacatttggagacggagaaaagaatttttgaataaataatcgtccgttgaagatatcagtgagaaaaatattttaaaattacctggaatcaagtggaaataatatccaaagttctagaaccattggaatacagcactaggacttttaaaagcaatttgaaagctacaagttcctacaataaaaatttaatagatctcaaggaaataatcttatgatgacatatgtttctacaaaaatataggctaaatataaatacagcagatggtaaaagtaataaattttaagacagaaattgatgaaataaggatgcaaagaacaatacataaaaagtaacaagactgacatacccctagaaaaactagtaaaaggaagataaaatgcaaattaacaatggaaagacaattgtttcacacaccaaagaaatcaaaattattagggatatatatatacatatatatatatatatatatatatatatattctaaagatgtaaaacctagaagagactgataaatttctaaacatatatttcatacaagggtaaatcaagacatcattaagacctcatattgagtaacatgattgaagcagtaagtaaaagtcttctacaaagaaaggactagtgttgcataccttgttgaattctaccaagcttttaagtcataacaccaatactgcacaaatgaccccacattggtgaaagggaagggactctccaaactcgttctatgaagtccatgaatatcaaaattagataagggcaaaataaaataaaaccaattaagtcacctggtgcacatagatgtcaaaattattgacaaaacatttgaaaaaaaattcaagacacattaaggaagctggatgtctctacaattttgttcaaatgactgcagaatctgaaaaagctgttgctgctattgatgcataacatactgccattattggtcttttatataaatatatatacatatataagaaaattaatgaaggtaagaaacattaaacaaatgtgtattatcctgtcccaataaaactttgagttgcatttaaaaaatcaagaaaaaagaaaaagaaagccatgctttaccaccttgtaggtttcattccaaagatgcaagcttggttccacatatggaaatccatgaaagtgattcactatataaatagagttaagaacataaatcttagttttaggaaaaagtgataaactctctagttgcatataagcacatccacattcacatagaaatagttccacatatttttaaggaaagaaaaatataatttaatgtatattggctacacaaatgaactcatagccgttgtgatagcatgtcaaaaaccatgaaagctcaagccagacaaaaatcccagaattgataggggaagtgaacattaagtctaatggtagtaaataacaattagcagttaatagctactgggagaggaaaagtcagttttttgtaacagtgtagcccctggcaagtcaaccatacttaagtggaggaatatatggtcagcagaaattggaatttctgctaaataaataaataaataaataaataaaataggacacaaagatgggtgggtagagaagggcactggatctgagaggagatggaagaaggagtgaatatgatcaaaatatattataaaagttttcagagaactaataaaaagagaaaagtgaaggacatgctgagtatcataacagctctccaagataatatcatttgaagtgacattaatgtattgattgattttgtttgtgggtagttgtttgtgtatgccatagagtacctgtgaggtcagaggacaactttatggagtcaatgctctccttcagtcatggttctatggcttgaactaaagttatcagtttgtgtcacaagcgcttattctcactgaaaaaatctcatcagccttgaaagtgatattgaaccaacaaattgggaagaatgacttacatgaagtgttgggggaagtgtgaaggttctgaaacacacaaaaaaaatcttattatataagaaatatcccttgactcactaagacaaagataaaggatgggggatcattaatattaggtagttaaaattaggagagatggcagagaagaattttgtttagctttaaaaggtgtggtaaggctttaggtttcattttataagtaacagattttcctgcattttggaacaacttatctagtttaagcttaaaatattagatattttaaaagatttaatgtgtgtgtgtgtgtgtgtgtgtgtgtgtgtgtgtgtctgtgtctgtgtctgtgtttgtctgtgtgtgtctgtgtgtgtctgtgtgtgtttgtgtgtgtttgtgtgtgtgtagcttgcttatatggatatctgtggaccgtgtgcattcatgatgcctacagaggctagaagagaagattgagtctcctaggactggagttacagaaggttgtgagttatcatgtggattatagaaataaaaccaacccagaacctctgtaaaaacagccaatgcttttaattgatgagccctcaaaatattagatcttaaacatataatgcagaccagttgtgagaggttgtaattcacaccagatagcaacactttaaaataataagaaaactatttaaaatacattttgtagaaatatcaacatgaattgtttctgaattgaaaaaatagggtgatgaaaatgtagcaaatataatttaaatttacaaagatgtaactgcatcaagttcccaaggtcaagactgtgaacatttcacttttggaatgtcaaaatgtaaattcctggaagaaatccaaatagggtgatgagttgtctcttacagagtatagaacgccaaagggattccagtcttaggcagagaaaatttatattatcataatattgctacaaatcatatttgaagctttaataatagataaaaatctagagacacagtcctataaaagaaagggtaccaaaagagacttagtagagaaatgagaaatgtagaatctactgataacatgaaaatcaagacaaacattttaaaggaatgaaaatagttcatgtatgttaagatttaaagaagtgaagacaagataggcccaattaactcagcttcattagtatctttggcaaaatattgcttggaaggtctggaacaaagccccaggatgatgaaggcattgacagcaaagtgaagttaaaactgaatgaaagggaagaggagataagtgtcaggccatttagttgaaaagggggagaagagaaattgacctctacaaggtcagaaatgtgtggcaagggaatgtacatgtttaaaacaatgaattgagatactgaatgttcttaatgttgcaaacactggtcaagaaaaataagaagggcacagatacagaaaacaatagaaacaaataaataagtatttgaaaaatgaaagcagatggaatccagagcctgtgtaacaagggaggaagattgattaagaccagttaacatgtacagaggtatttctagaggtgaacattgagtcaaggggagaaccttggtagaaagtcaatgatgagttggactagctttttcccctttcttgaagatggtcctcttgatggcctggatgagttctttgtttcgaagactatagataatgggattggccaaaggtgttaacacagaatagactacagctagagtgcggtcaagagtcagtgaatagctcttctttagccgaacatacatgaagatgatgctcccaaagaatatgaggaccacaatgagatgggaggcacatgtggagaaggccttccttcttcctgctgctgtttttatcttcagcacggcaccaatgattctcccataagaagtcatgataaaaaggaaagtgataaggatgatgaaggcattgacagcaaagtccaccagaacattagtggatgtgtccttgcaggccaggctcagaagaggtggaaagtcacagaagatgtgtggaatttcattgtagttacagaaagggagctgagagacaaggatgacctcagaaataggacacaggaagccacaagtccagcatccagcagccatcttggcacagagtgatgtggtcataattgaagggtagtggaggggccggcagatggccaggtatctgtcataggccatggctgtaagaaggtaacattcagaggcccctagggagtggaagaaataagtctgaaggaggcatcctgcaaaagaaatggtcttcttctcactaagaagattagctagcatcttggggatggtggtggcagtgtaccacaactctaagaaggagagaacactgacaaagtggtacatgggcttgtgaagggctgaatccagtcggatgactaggaagatgagcatattaccaccaatggtgaacaggtatgccaacagcagcaagacaaaaaggcagcccctgatgtgtcccacattgggaaagccaaggagcacaaactcagacaagcttgagaagttgtgttgatccatgagaggctgaagcggacaaagaaaggttgaaaatctgaattagagggattgctaatctatattgatgccttatttatctttctccttcataaatgtaaaggaaacactttaattactgtcattaatgctaatgctattaatactaaataaataaaataacagctagctctggttttgaatgcattcattgggaaatgtaccattgtcatgccaatttatacaaggaacactcgaggatgaatagaatgtgactccttgctatgtcatttgacaccatttcataggaagaaaatttcaattctttactcatattgctcatatctaagctatgtagtcttcccagagtatttctatatcttcccctaattcatacacagacttttccttagcccagcctaaaatgataagttaatatgtgatattggtatagcagggctttcttttcttgtcaactggctgaaatctgtaaatactaattgaacaaggatgtcttgggactaaagaatacaaatctcagcaggatacaatctctgatagcagagctcacaatcacatcaccacagggaagtatttccatcattcttgtccatataacctgtgacataaaacaccactgagtgtcaggaagaaggctgatttgtcagacaaggtttactgaaacggaattctcaaaaaaggaagacattgagccagttgtccaagcagagaaagaatcaatggcagagggaaagaaacattacagacaaatactgtttcttctgggctacaagaaacctggaaaaggcactgtgtaaactcacccattgacctaggaccctatctcaaaagatgcaaagtgccacgaaagaatgattacagaggctgatacaatcagctgtagacagactgccaacccagctgaaatatagctcttattacaagaacctcagagatggatgagcagaggtgtcttgtgggtacccctaaatgaaaataagatggatgagcagcacatttggtgattgaatgtggcttcaaaattagtaatgataaagtagcaataaataaaagtcccctattttcagaaaactaaccagaatacacaggtaaagaagagacagacaacttggtgacattccatctaaaaatgtgctggacattcccattgttctcaagcataatgtgaacaatatataaaaagaagagaaaggaaagatgggaattgaaaggggaagaaaggaagtggggataagagatgagagattataatgtcacattattgtataaaaatggtagccagcatcagtcactgtgcccattatagatcacattgatcatattgaatggccatctaattccaaccatcattgcaatttttcagctggacctttagaataattgttgttacatcagcagtattaaataaaaattatttaaccagctaactaaataatttccataccagacacttttgctttgatttataccactcactctaacccaaatgccccccagcccaaatgccctcctgtagagatatatttacagatttgctgcttttaaatgttaaattcatgcaaagcaatttctgtttaagcgttacttattaaatctctcataaagaagctatgtattcaccttcccaattacaagagatggatgtcaaaacatgactcatgcttcattgcattatgggtacttttgctcctcttggccactggcttctggtttaattctcagcctttttcctccttccatgacctacctcttgcatccttcacaatcgggtcaaatgttagctcattaatgaagcctttttttttcttccctagggaaagttattctttctataccatcataacatttagagtgcctaatcagcatagagttgctaccctataataagctctctttactacaaatctgggagatctttgatcgcaagtacacagtccgctaattaaggcttatctgcaatgaataatggcaatgataaacacagagttcaggtttcttgtatgctatcttccccctacaaccaagttatgttacacctttccacctgcacgaaggatccctatcctgtcagcatctcaagaatcaacatacgcaaattaatcttccctaatctgtcaaacatcctgcctttttctactcccaacccaaataaataaatgtctgattatcttctgtgtctaaggaactgttagtgttcctcctttctacaaatgaccttgtctaaagctaactgtaagttcgtgtcaaagaaggtctggtgagcatgagatgctttcagaactgctttgaagacttgtgaaccctaaattcatatatcaaggatgcttagttacttcaataaaaaataaaacgcagataaggctctctttaggtgttttccgaaaatacctgcccctaagagatgttaagacttctttagatattagctgcagtgtctacagaaacctgtactttataccatctgcactagcctatagcttgtccgcatcatcacccattccacagtgcaaacagtaacaaatttctaatatttaagtgtggactggaaaggatatgggtcaagctgacctttaatgtttcttgtaggtctaattctgcaaggtttgtaaagctgagttttctaaaaaagttatgcaagccatctgtccattgatcctactctataatcttgaaactgttttcaattcccttataacacctctttgatccccaatgcttacagctagttaatcccccagttaactgtatgtttcaaccttgcctggctccgtatgtgcaatagatgaaggcttgattgagcaacactttctccttcttcatgagtcttatccccacagccacattcccttgagtcaaagaaacaaattttagctcacttggggcacaaggaagcaagaaacccctagttccagcggcaaaggagaataagactcaattgggctccttggaggtctcaaggaaacaatgttcactcctgagagctggtttgagataattcatctatctcattctctcccatgctaacctgtttctagtgacttcttaacaaaaaggaagtctaatatttctctctctttgagaagcctcactgataacagctaccacctttgaaataaataattggtatggattcttattcttttccccaataaaacatctgctttcagggcttttgcttgttatcaaatagttctctaagcacagggcatgcatcatccaatacaatcttcgcagtcactctaccatattggtatacttattagtaccatttaattcctaagtaaactaaaacagagcctccaacactgtgccctgggtcacacatgtactcacctcagcattgtaaacaaagcactataacaaagggcctgttctacctgtgcctcccaaggtgtgggcagtggtcaatagaatgtaaccaaagtcacataaccacagaatgatatctgtctcaagccctgtgttcttgaccagtatccattgcctttctacctttaggtggttatttatttattttaattttatattttacttactataagggtgtgttgtaagaattatatggtattaaatatcaagagaaaccatacttatctcaagatattagtctactttttgttttgtttttctcagtttgtattagttctttgaaaactttccacaatgttttggtcatattaacaccctgcactcctctcagacccatactctcttatctacacatccagctacctaactctgtgccctttaaaaaaatcaaatgcagtaagtactgcatgtactcctggatttttggccttccactggagtgtgatcaacccatcaagggactgcactctttcagaaaactgactctcccactgccaggagatatcagctgctgccaacagttccttatttgcagggcagcaggcaggttgggagggagtcatggtccctctatgctctgtggtagattgaccttgtgaaggacttgtgcatgctgtcacagctgctctgagttgctatgtctgaaaataccagatataataatgattgtgtacacatgtgtgtgcagagagatgtggggagccaaatgagacttttcttaatccttagattctgcaatgtctactgctttttctgcctgacacaagacagatattcaacaattgttaatcatatgtacatccagattaagccagatgctgcagtattgttgcattttttaaagtccccatctttaataattcattcaataactacatttcaaacttcattgtgaaggtgtaaccgcttcttatgtgtctattgaattctgtgtccacattgcctagtactctatctgccatacagacagacaatatagctaataaatgttttaaaggacctttctgtcttatacacatttatttggagggttcacttattaatggcctaagtacgaatggtgttttcatttgataacaaaacatgaaaacatatcctatctccactaaagttcatcttatgagttttggtcagttttccaaggtatttaacttatatcaaggattggattttgtcatctcctctcttgtgcattttactaactttatattaagtatagatttaataagtgcatcatttggtttttcatctatcttgctacaaaaaccgtagacatgcctgttgattttattgaccactgtaacagaactttagttccttctttcaaggtcgtgaattaaacattcagtagggaaaagtatctgtccttaactacactttaattccatttttagctttctgttttttccagtgtatacggtacatgttcctaggactgggatcaaaagggcaggagacaatacaaggtcagaaagcctggaaataattaaaagaactgggaaatgcctcatatgaagtattgagggatttcatgacaggactctgaatcactggtggcagatgtcacgccagatgccaatgtatcaggatacaaaaacaaacgtattgatttggtcctatgatacaatttgctctcagattataactcaattcatacatttttctcagtctgtacttacacagtagcatatacttttgctaagcaatgggtacttatttttttaagatccagataataaatacttttgacctatcagttctccagagtctataacaagtattcaactttgtctctgtaacataaatgtagccatttatagtacaggaaaggatgtctgtggctctcctctggtagaaacctgtctacagaaacagactgccgatcttatttggtccagagtatatgtgaaccaagaatttggcagttcatacatgcatgctgaatacatacacacacaagcacacaagcacccaccaacaaccacacacacacatacacacacgcacatacatacacacacacacacacacacacacacacgcgcacatacataaatacacactcacacacatgcacatacataaacacacacacacacacatgcacatacataaacacacacacacacacacacacacacacacacacatacgtgtgtgtgtgtgtgtgtgtgtgtggttagtgccacaggtacgtctgatagatctctcactacacacaagtatacatacaattttattttaagttacattttcatcatcctagtgttttgagaatatcttcacttggaattatccctcagaaagcgtctctgtctttcccagcatgcaaccacagcattccaaatgcacagaaaaaaagatttattctcataaaagttttctattaattgggctttggtatattttaaaaagtgactatttttaatgacttccattgccacatcccgacacatataagacatacacactgtaatttctatgagtggatttggcagagacaacttaataaaacctgaagagggcagaaatcaaggaataaatgtcatttaagcctccttcagaagacagaataaaaaatgaaagcatgtcatctctttaaaagggaagaaaatctaaccaaaaatataaaatgcatcattatttttcagaaatgtttaatccctttttatgaaaaaacataaaattatgacatttttctaagatccagtcactagagttgtgaatgctagtcaaatgctagttgcgaatgctaattaaattgaagcaaacctattagatatattatatagatatattaaaattatatagatatattaaaattaatgttaaccctgtttgtcagtctttcttaaatatagcactcaggtacttttgttatctaatgggcaggagaagtcaggatactactgttggaaattttatgatccatataaaatgtcaagattcacaagtgtcatgagttgttaataaggcaggcaagtaagaatacccatggtaggcacattcaccactgattggagggtcactttctgagaaagatgggcccctatacgtccatagctcagagaagcctgcatttctctgtaattctcagcaccacagatgttctgtagagaagaaggaagaggaagaagagaaagagaaagatagagagagagagagagagagagagagagagagagagagagagaatatgaagttggttcagtagggtagtggggagataggggaggagttgaggaaatggggaacaaagtatatatggaaaattgaaataaaaagattaaaaatacatttaaaacacctaaagttgggaaggaaaagtggtgatgggtgatcaggaggaactgggtaggagagaatgggagatggatgtctttaaaatgcattaaatgtatgtatgaagttatcaaacaataaaataaaatagacctgtaagtgacttgaaacagggagccaagagtgccctgacttctcactttacagccttccatggttcatagagctagtttttcacaaaggggatacatgagcaatgtttcctggttgactgtttcaaatttagagtgtatacactctttagggtggctttaaaacttgcttagacctctgatcacctagaaatctttgtttcccatctcattctctttcacattagaggaatcctctactccaacttccaacaggttttattacaatgttgctcaagaacattgagctctatatacctttgttttctatttctatagttcactggtctccatctcaacatttgtccaatgtgccctttgaatcttcctgtaactaatctcaatgtcttctggacctttctccaaaaattcagtataaactacaaccctctagccagcctaggttctagaaattcacacatttcaatttctttctgtctgcataaaaaaactgaactttatttatttattttgctatttatttcatcaaatatgtgtcctcatccacacacatattagtaggttcagggactatattttttctccaacttttttttttcagtttgtccttattcaagactactttagttgactatttcatatattattgaaattatgagttaattattgcataagtaaccagctcaatattgccattttcaaatgggtaaagtgataaacctgtaggactctagaatcaagtcagcaaagccttgatcttctgtgtaaccctcttcacagcctccttcacttccttattgcgaagggtatagataatagggttgaggaaaggggtgagaaaagtgtataccaaggcaataagcttgcctctgccctcagctcgaatctccggtggccctacatagacaatgaaggcagagccaaagaacagtgtcactacagttatatgggaggaacaggtggagaaggctttggcacggctggcagctgaaggcaacttcagaacagctttcacaatacctccatagagtcccaagatgaggacaagattgcatgtattgatcatgccaatcactgcaatataaacctgagcatgccagcttgtgtccacacatgccaactgcatcactgggcccaggtcacaaaagtaatgggctacctctttcaagcagtagggtaatgtggcagtgagaccagcaggtactagggcagctgaaaagccagctacccatgtacccccaactagtcgtagctgtacctgtctgctcataagtacatggtagtggagtgggcgacagatggccaggtagcggtccagagccatgacacctaacaggtagcactcagtcatgcccaaggaatggaagacatacagctggacgaagcatgcagccgatgggatgggtgaaggtccatggagcagggtatgtagcaaggtgggcactgtggtgctgacataccagagttccaggaaggagaggacactgataaagaagtacatgggagtggacagccctgaatcagcttgaacaaggacaatgataaacaagttccctgcaagtgtcaggagatagatgcacagggttccaaagattgcaagatgttggagggtaccagttggagtgaacccagcaaggatgaaaatttgggtccaggtgtagttaacatgatccatgattcctgagaatgagagataaaggcaccaaatgagcagtgttaggctttttacatctcgagtgcaaagactagaagacacagctaagaaataatttataatctatccaacccattccctctagtctataaaagaggaatcaatactagaagacataagtgatttgcacagtatctgtcactgacagggatgacatagttctggttccttaatccacagaccaacatttagtggactatggcagcagagccttaggcctaggatttctcctttctgctaaacaaacaaacaaaagcaaaaaaaaaaacaaagaaaaaaacaacaatgaaaaagcaagagataggaaaattgtctttctcattctcttaccattccaggtgaaatgttcccataatactttgaaataatggcccttactatgtactggcttcaacaaccagggtgcagcaggaaaaggagacttacttttttaaacagctgaatctcttggaacttatcaaaaattctcatcaaaggttgaaagaggaaaggatggacaaaaaccaaagctgtcttgggagcattccacaaaacttagatctttgggacaagatgaataatcaatgaactggaaggatttttttttttttctgggaggaacttacaggagacaaacttcaggattctgcaggggatagggaaaagggagacagtatgaagccaggctctgggaggtgtgcccggaggtgctgaggtagtacacatagcaccttctttcaggaattgcatttctaaatttgttttatcagcaactcaaagcaaaccttggtccagaccactgttttctctttgtttcaatttcttcgagtgaagaagtttaagttagaggttcatgaagctccttgtaagtcactagtctgtgtttatccagtcgctgattgatgtgtgttgggttagcatggagatagatagtctacgttaacatccctagagtaccactcccatactccaagggacattatgaaggaaaggtgaaagctgttccctactcttctttagccactcttacctcttctgtgccacctccaaccattacctcactgccctggttacagtagaactaatctcatccttattggtatcatttctattgcaagaccctttacttatagtccgtgctcctggaaatgcaggtctcccacaacaccttaatgaatgttccctggggctgctatgactacatttcagaatggatccccctggaccaaagagttaggctagagaagtgagtcagatgaggcatgtttctcaatcaacttagccctgaaatcttcacgttggagttctgaaatccattcctagggatatttcctgtttcacaatgaccatataacacaccattaaataaacaatccaattctcatctcctcatttatgcatggtgagtaacaacttgggtaacccagaaatggattgcctcttaaatccctattggccaggagatttgtcattgtttgccactattagcctaacaacctaaccacataggaaccatccttctatgctgaacacctgcagcttcatcacctggcactacagtggccaccattagttcattgttccaaccacagcttgccaatatttaaaatactattccaggttttattttgcttttaaaattattggtttaaatgtcgggagccgaatattgtgctattagagggtttctcggggtccaaagctccggcgctccagtctacattgtattgcagatgctagctgatttgctgctgaatggcatagcctcagtggagaatgtcccctagttttgcatctttacagaaataagcatttgaatatgcctgcaccagggcaaagggcaaagtctatgtgatgagtgagaacagatagttaggaggtatctggaggagagatggtagagagatctgctgatagggtctagggagatggaagagaaatggtctccgggtcaggaaacaatggttagattacagccaggaagatgctgaataaagaagagattccagttttgcagcatggaactgagagctctctaaagatggcaagatgcctgtgtctagtctttatctccattgggttgctaggagtttccaagtccacgctcccccactcaggccaaaccttgtggcttctgtggtctggggctgagacattcagggccatggcatttatgtgttttgtgaatgtgtgtgcctatgtttatgtgtgcaggcatgcaggtgtctacaaaggccagaagaggtcatcagatcctccggagctggagttacaggcagttgtgagctgccggagatgggtgctaggacttaaattcaggtcctctgtaagaacagaaagcattcttaactgctgagtgatctctccagcttcttgaaatactattctaaacacagtattttaaatccccatcagcaggattgctaccagtactcaattcagtccaccattttaccctggacacttcaatgagacaaacttagtatttcacaaagtatttctactcttattttcttcaaaactccttatatcagtttctgagttttaatctcagctcagtattagctatctccacatgtgtacttggttagattcagagcccagaagaataactagttaattgtggttacccattgagttgaagcatttgacttattcattgatataacggtacttttagaaaaattcagagcaaaagacatgttcaaagtagttgttaaattcaccataagagaggggaataatatattatattaagaaaaaggtagctcataaagggattggtcttgtggaaccacaggagttttggtgagagtccacccctcctcccaaataaaaacagtctagataggaagccattgaagataactcttaaatcatgataggaatttctccacagttgatggcctctggtgggggtaagttggggaaggactcagatttcttaacaggctggttactgggagcttgaccatgctccattgagtgtaccagcaacacagaatacagttagaatttgtttctttcttcttttttgtactgggaggacgtcataagcatgggagtgtagacctgggaggactggaagtgagtgtgaaactcgcaaataatcaataaaaatgttatgctggaaaaagaaaaacaaaacagatcacattaagtggagagaaaattctaaatgcctgagactggaaaagcgtcctgtggaaaacagcattggagaacaaagcattagactcacagtgcttctgagtgcgaatagacctcaaggatgggtagcttttatatcctacttcctctgaaatacccaactattcactggattagatacctgcagcagtctttcaatgcaatgctgtatcttctacaaccctacccaaggtgccatggtttatccaaaccctgaaattaataatggggctactcaaagtagcagtgatagtactccttaccttcacatcacacttgtccttctgcattcctgttttgccagctaagttctgagaagaattgccacagaattctacatttgatgtgatatctccttttgcatgtctgaaagcatgttagtaactgagtggattatactttcaaaccccgtgtctctcagggtattattattcagaaacaaatgcctgatcatagaagtaggagacgctatatagcatcacatagaagaagaatgtatgctatcaagttgtaatctggagcaaagtatagcttttcaaattatctatataaaaatcttaagtgggacaggacataatatatacaaaatttaatagatcattagtaaattttcaaaaaatagcacatgcccatgagaaattagaagtgaattaatgaatgctttataaggttagggacattgaagaagagtgaaaagaagaatcatgaaagccagagatggtagatgagtacaagcaaactgttttctggacacagtagggtagatatacaatgaactcacttcacttatgacaacatgcataagacttgtataagatcaggaaagaataaatcccagcatggagaggagaggtaagcatgaagtcctattcttagctgaagctattggcaaatgtcatctctgtgggcaggggagagtcaattttaagagtatcccccccccacccacccacataggttcaccaagcttcagtttaagaccacatacccaaggatatataggcagtgcaaatagaacttaatggctttaatttttttttgaaagaataaagatgatacaaagtaaagttgagtagagaagtggaggagatctgggaggatgggggaggggtgaatgaaatcaaaatacgttgtaggaaacttgcaagcgctaaagaagatgaggaaaacatcacaggtttataaatgattgtgaacttctattcatctaaaatcttatcatgctgtatttataaataatgttattttaaaattgctccataacgtctacaaaaaggcatcaggtgcagttcaaatgtacctgataaacaggaaaatgatgtgtcatggtcatagttcattccacaaaataactgagcaggtttgcattcattgtccaaggttcttactaatcgcacctttcttggctacttactgtactagggttagggcaaagtacaaataccctgcatgaggagtgctgggcttactgcaagtgcactgtgagtgatgtattcacttttagtgctgacctctttatactgtctgttctactagagtcatccagatcccaccatgggaggagtggccaagagttagcatgagtatttagctctatacatcacattaagcacttataaaatatgatgccatttgtggtacaaaatatatagtcacttcctaccagagccactatctgggcactcaaagggtatgtagaggggatgatgatccagtaacattacacacaaagcatataaaaattatgtgtataatttgaaaagcactgtgtaaaaatagcctcagcttcatgttataaagggaaagaccccaaggaggttaagagataaaaccattgcacaatgaaaggcaatggtagttaggagttgtgaatggatttgtgagaggcattttctcttgatagggttaaaggatagtaatataaagtctgccaagcttatttgatttttaaaagtttttatttatttgcttattcatccttcttcaaatttaaatgaataaaaattcatcgtgtagtattcattgcttccctaagttgactgactacttccagctccacagcagatatgtaagcaccccctatcctaccatggagcgtgagcaccataggaatggaagcccacagagttaataactaaagtgatgcaagccactgccaggacaaacaagtcccagttctttagtgctgatgacacagaaaacaattcctttgaaattacaatcggtaaccaatgtgaagttagaggcataagtagagagggtgggggtctcaaacaaaagccagaaaaatggagtactgcacagtactgtacccagcactgaaagagcatagggttagtgatcatgtcagaatcctcaggttacataaggaggactgtggacacagcttgggaggagatgcttcattggaattcctcaagtatcctgcataagtcccaacaaatgtgagctatgtgtacaactaggcattctcaaataagcaaatccttcttgcagaaatggatgtgggaaatgttggaaaataacttttatgttgttcctaagatcctattactgcacccattttacagatgaagaaaattaaggcagagattttaaatatattgcctaaggtcataaagcaagtgaatattagaattaacatttgaacccacacaggaaacattcactctcttttctaatcaccactgtgagataacaagatcaatttgtttactgaacattctatattcactagaatttcatactattctgttaaagatgttttaaggcaaagagaagtcagaaagcaggtatttcccccccagtaagtagaaaaaaaaaggaggggcagattttgagcaataaatttcctttcttcagtatattcaaaatatgctctcctgagcctggatctgataatgcttttgaaaatgtttcaatgctagaatggaaacttcctcccttagaaggaatgtgagcagccttccctgccagccactcagatttcacacaaagttgagcctgaggtgaccctgttaaggtcagctagacatctggatgacatctggttgaatctggctcttgaaggcaattccagtcatccttctaattttgttgtgacaatagtgagacaataatccttagtcagtgggatatgatgaaggttttaaagtgtattttaggctaggcatgattttacagttgttgttaagcccctaatagactgaagcactgtactgtgagtttaaggcctattatctggtatacgcagtgaatctcaagccagttgggatacaggttcaactcaactcatacacacacacacacacacacacacacacacacacacacacacacacacacacacacacagtacacacacatacacacacacacacagtacacacacacacacacacacacacacacacacacacacacacctgtgtgtatacagaaataataatcaccaaccctgatgtggggagtgctcaatgtattaattgctttgatttttgtagtgggacagatgtaagaaagagaaaaacgccacacattcacagtgccttgtctctgtcactctaattaccagaccacacctaagtgggtatctggtggctcagaattcacaaacctctgaagtgtggaggctaaagggaacagtatcgtcagacttttagcacaggatggggcctgacacaacagatttgtgtggtgtttccctttgtattgtgtacatgcacacctttcctgcagcacccacaatgcctttctgctcctcctgtaaagtatggcttcaaattcattccaagaaaaaaatatccacaatactgaaagagagctcgtgctcaactccactgtccttggcccatgagagacgaggtgagtaattccactctgcagcctgaaagctctgtcaccctcagctggctctggcactgtgaatcaagattactagactggtccagctgggagctctctgctccatgtgaatgtgcacacatgctgtcattgtattgtttctgtcacccttgttttctgcactttaaactctctgttgggatcatggtttgaaatagagaggctgctgctggctttagttggccttacttctctgttgtcacgcctgtttagttcatccgctatgctttaggatttgtgaattctgagctgtcagctacctactcagagctggtctggtaattagaaggacagaactaaagtcttaacagggactaagcactgggtgaatgtgtttcacttttctcagttcaaaaataaaagtcataaattcaattgaaatattttctctatacaagtttttaatctgtggtggcatttcttcattggaaaggattagggggaggaaacctcttttccctctactggcttcacctttgacaggtgtaagagagtgggtctatgcagcagagtgagtgctaaactgagtggcaaccttactggcatttattttgactctgcaaaatgatgaacaaaccagttgattcttacttttgcccggcatgtgggtaacaccaaaagagatcatcaggcttccctcaacgaagccctgatcttgtcactgacccttttcacagcctccttcacttctttgttatggagagaatagatgatggggttgaggaacggagtgagaagggcatacactaaagcgataagcttgtccgtgctctgaggtctgttctgaggcgagcccacatatacagtaaaagcagaagcataaaacaacgccactactgtcatatgggaagaacaagtggagaaggctttggcacggctggcagctgaaggcagcttcagaacagctgtcagaatacccccatagagtcccaagatgaggacaaaattgcatccagtggccacaccaatcactgccccatgaacctgagcatgccaggttgtgtccatacatgccaaccgcattagtggtgccaggtcacaaaagtaatgggctacctctttcaagcagtagggtaacgtggcagtgagactggcaggcactagggcagctgaaaagccagctacccaagtggcacctgctagccacagctgtatctgtctgctcatgagtgcatggtagtggagtgggcgacagatggccaggtagcggtccagagccatgacacctaacaggtagcactcagtcatgcccaaggaatggaagacatacagctggacgaagcatgcagccgatgggatgggtgaaggtccatggagcagggtatgtagcaaggtgggcactgtggtgctgacataccagagttccaggaaggagaggacactgataaagaagtacatgggagtggacagccctgaatcagcttgaacaaggacaatgataaacaagttccctgcaagtatcaggagatagatgcacagcgtcccaaggaagacaagaggtcgcagagtgccagaaggagtgaaaccagcaaggatgaaagcctgggtccaggtgtggttagcatgatccatgattccatgaaggagaggcaggtagttaaggttcaagacgaactacttcaggctcctccatctcttcatgaaatagtcctagagacaaaaatagcaactgtgagcacgtggctgagctttggcatcatctaattaaatcccttatgtttccatagtggaactgcagctttccccttccctttcctgcacccaaggtgaaatgattggctgtatgccataacatcaataggtggctggactggaacaagaaatgaagactcccaaccctgattagcctttgtgtatgttctagtactggacccatgagagtccagcaactcaattctccactatcccactgtcaataacagagaagaggaagcgtttctactgtaacctctcccatgacctctatctttccttcagtctctgtgtatccagtttacattaataaaatatccagaggtattgtgttattgtaatggaaggattgccatctaaaggtggttatggtgactttccccaggaagtcttcttatacttcatcgactgttttgctaggtaaggattaggtgatctaggcatgaaaatggcacagaccctccaagaatattccctaaagtatcaggcccatggtatctaattgttattcactcaacactcatactgcaccttctaaaagtgagtcatcatgagagacaggtaacatggattatcaaagaagaaaagcagcagtgagaatcgccagtcagggaggagactgcagcaggcagagactggctgcatgcccttgctctgacacacccctgttgtacactctaaactgggggatttttcacttaaccaacttcctcttccctacatgaagaatggaaagacttgagagttggttcctaaaaatcttacaagttctcatatcccaaggttattgggaaatgattgtgagttttgtgagcatcaagtcagattttgcttaagttttcttgccatgccctggaaagactcacttggaaaggtgaaagctcttgcctgattctcttctgatcatctcataccctctttacaaccttcacccattacctgacctctttatggcactagaagctgcagcatcctcctcagagcaatttccatctctgtctacttatatccaatgctcctagaagggccactttcccagaggctccttgtagggtgttccctggagctgtgagtatgatgagttctcagtaaaagtccctctggagcaaggggttgggcaaggataagtgaacacaccagttctgtttctcagacaacttctcttcattctgcacccaggactgacaccttcatcagtaaattcatactccagtaagagacaataagtactaatgctatgggaaatgacttcaaaggaagagatgaatagttgtgtaaaataatgtttcagtgaatttaatttttaatctaaatatcctttttatcggcatattttttcataatatttcctaaggaaaaaatgtgaaccaaagttcaaagtggcataataggtagctaaaccattgtgacaaaaagtactcattcatcaaatattcacggagcaagttccattttccatactttgtactaggataaagatagtacagagaacagtatttctttctacaagaagtttaattcgtagtgtgagacatgtctttaaacagaaaggaaaaaaacaacaacaaaggatatggaaacatgtgagaagacatcaacctaactaaaaatatgatgtgttcaacctaaagctatattgtgatatttccctcatggttttactttaacaaagacctagaagtttacaaacatacttgattgaaagtggcaattgaacagatatttttcatgcatttatgtataggaatataaaataacatgcttcaaatgaaatgttagcaatacttatgtaaacccaacactcatcttcattaaaatcaggttatcccatttctaggaattcaccatgtgtgtgtgtctttgtgtgtgtgtgtgtgtgtgtgtgtgtgtgtgtgtgtatacatatacacacatatagatgtatttccttttagtcttatttataattgtaaaagtccagaagcatttccacaatagtgagccaattaaataatacaaaccaggagataccaaggagctttctatcaaaatcacaatgccctttctgaaattatatataaaaattttccagtatgaatagaaatacttaaattagtttgcttttactcaagaaaacactggaaattgtaaaaaaaaaaaactatcagatttttttttctatgagtatggtgtgattcaaaacacagaaatggaaaaactgggtttgggagtgggagaaacactcattcatattgccttctgtggattactttgactattaaaataataaatataggtatgttatctactgtacgatcaccctcactttaaaaactcacattagtgtgatggcactgtgtcctgctctagcaatcaatgatgagtgaatatttccctgagttgtgaggtgactgctagactccatactatgatcgcaagttcttcatgctcatcacggaatatagaccctaggaatgaattaatttgatcaagagatgctcagcacttcttttgggtatcaccaaggtatgtgctgctctcttggagttttgttcttttcacaactacttcccaatacaggttgagatgactgcaattagaaagacagtaagtaaggagaaaacagttgtggtacctattttacatagataagaagaatgacaaggatgcccagggtttcactaaacaccttggtccaaaggaaatgatggacttgaattactactagtttgactaccctttatatgaaaaatgtgagacttatatatgtaaattcccctttatggaatttaaatgtaaaaaatttcaagtaatgtctttctcatatggatatatacttttccatgtgctttacatgtgtcaaatactttagcataagaattctctcaacttatctattgtctgcatttcacaagagataaagacaagtgaaaaattcaaagacattagaggtaaaaactattaaagataatgattgaaccatggcaaatgatgttaaaatcccatctctagacattctctgccctgcatctggacaagaggggatttgttaccacctagaaaccctcttaagtgatcagacttccagcagccactttgcatatttcatttcttttaatctttctgagagtttgagttcattattctgttttaagggtaaggaaacatattgcagaaggtttatgttttgcctagaattttataattaaaggaggcaaaacctggacatgtgtggacatatttccctccttttgtcatattcagaaattgcccatctggttgggcctgcatcaggtccttcttcttaaatcagggttagtctgggaagagatctcaaaggtagagtgcttgcctaaacattcatagtccctacattcaaaacagtgttgcaaccacataaccaaattttcttaaagtggaaagattctgaaaagtcatctaaaaccaacaggtattttgcagatagaatgaggccaagaatgttgcaataaagcagcagaagttgccaaattcatccaaggatgaatgtatgtttacttgtaggaaattcagaattgtttctttatgtgctttaaataactggcatgtcttttagaaagaatgtgtaaaggaatgtaaaattggagagtgggctaaagaggtgggtcagtgtgtaccagcatctgctggtgagcctgaaaacacaaatcctatctctaagacccctatggcagaaggactgttgggagccaaagatctcagggtttggcatgagatcctaggccattcttggccggccacatagttgtatatcaacctttacatagcagctctttaaacctcagctcaagaaaagaaacaacttgatccagtcctccacccgcaggctcagtcacctagacagcccttcctggacctcttactcatgaattctttactctgccaaacatcctctttgtggcttcctaatatcctgcctacactaacacctggtgcacaaacaacccttactacccctccccatatcctgttctactgactatataagctagcctgagaaaagtaaagtttgccacttgatcagaatcctgtcttgtggtcgttctttctgtgtttcttgtccccattccctatccctgactctcttgctccagtttgacatcctgcaggtcaggacaaagctgttctataagctgttctttgatttcctcatgtgctcagaagtacatgcacaaatagcatgcacttccacatgtgtgtgcatgcacacacacacacacacacacacatacacacacacacacacattcatgtgcacactcacacaccacaaataagtaaataaatttaacaaaacagtggtcttctatgggtatggtacagaaattaaaacaattattgatcaaatataaaattaattttataaggaatattcaagactcacagagtggtctgtctctgccaagttctgtatgtctaaggatctgtgtatcttttagaatttcatatcccctccttggtctgcagttctgtcatcagaaaagttaaggggatgaagcaagtcatctcagagaagaaaatggtgaagaagccaagtgggcataaagaaggtcagagttgttaatctccagccttgacttcctatttctgtgtgttttcaccttgtatttataattttatgtgtgtttctgcatatatgatttgttcatctgtctatttgaaagaagagaaaatagtgttttctggggtgcttcatttcatctttataagacagatgggtgtgcatcttgctcaggctgtgcagattggcacaaccaacctataggaaagtgggacatgtgactacctgggatatataatgggcctggatacattttgaacagagtgcaacccattgtcaccatggaaacagtttgcaagactaagaactcaggcatgtgtactatggcctagacaatggtgttgactgaaacctcagacaatggtgatggccagaggatgaagaaattgatggattccggaatcttccaaatccaatatctttagagtaccatgcttaacccatatattaccatgttcttcactatgaagtatttctaatcattgagctcatctcctatcttccatatattcttcattcaggatgttatttttccactctcagaaccaggctattcatacaaggggcatcattttctctccaatcttataataattctggggtctttctaaggctctgtgtcatggtgaatacagtcactttagtgaacactctttaaatgatattgctccagtcactgcaggcttgatggttatcaatatatagattctggttaaattcctgatggctggtctaaataggcctaaaaatggacaggtataaatagcatttcatctaatcttagttgaaagtccttttattagactcggtgtctagtttaggtaactagagctttgggggtctacttgataaatgatgagtgagttatacatgtgttgccttagtgaactgccactaaaataagtgtttgttggacaacaaatagctgcaccaatgttcagggattgtagaaattctagacatggagagaagagaccagaatgcaccagcctctctgctcaaaggacaatagcatgcaatgagcctggaaatgttaaacacggattttaaagcgactgttcaacactccctctttttcagcacatctcaggctgttgccttgaccatccctgtctttagccacatgaaccatttgtttccatgtcctgttttcaagccaaggaactttgaccccactgctgactatggatgtgacacatcctgctggagcatatgtctcacagggaagcatgagaggcagaccttaaacagctttagaaatcctcccacaaaacttttcttcagagcaactcaggggaccagagtgaaacactaacaagtttcctaatgagaaaacaaactagttgcttaattgagctggggaagccagaagccagagaaaggggaatggttcccaggaggaagcctatgcccaattaataacccagggcttcaacttcagtaattatcagcattttctcttcagagatcaccagtgcaggagttacatagtagacagctttggggaggcccttgttgtttccctttgcttcctttaattagtcgtaattaggatcatggaaacacaggccaagaggtcaaagatgctatgttaagtctttgtaggagtcccttccccaggccatgtcagagactttctctaaatcatacaattatttcttgtatctatagtaaataatatgttggtttagactgtattccagtcctaggttagaattcaaagtttgccactagctaactgcagcataatgtgagctacagacctcccctggcctcaacattttaatacatgaaagtgattttactccgtgacatttatggtgttttgagctgtaaatctaaactatgataaatgatacagagtacaatgtaagtatgatgtaaataatcaaaatcagggtaccagaaacaaaggagtcaaatcaagttcaatagatttgactcttgactacacacactgggagagggtgaaatatgccagtgaattaaagcaaattcagctatttttgtattctttttttgctctttcacagcatgttataagctgccacttctatgaaaacaaagctcacttcttataacaaaacgattctaatcattgcctatcttaatacccctacttgtatgtatatgtacctgtttattatgattctcaggtgcaactaaaaagtaaaattcacaagtggataataccatagaatatttagtcaaaacccctacactttaattccaatcccatactctatcaatttaaaaatgtttacacagttcagttagtttgttttggcctcatttgcaagctgaaggcagcggctacatggaagaccaataggaagattttgtaaaataatttgagtgagcatacaaaaatttgctgcaggaatgaagcctaacattgctgacatctattatttttagcagcataaatgaatctaatcccaaacacaagagatgatttctaaaccttaaaagtattgggttcgagatgagttcaattaatgactaaaagcctagtgtcttcagctctgtgtacttatactagtctttagaattcattaaattataaaagaggcaagatctcttatacatcaaaaacactcatgacttgtgacatgatctagactcatatctgttcagatatacatagctctgtagtttagtcagggccaacagactacaatgtgctaatgccatatccttcctggaaggaaaaccctgccagaggctgtgacatttcagctaatgcaatcctgtcatgatgagttgtagggaagaatcatggcatgggaaatgactctttaaagtttgggatggaaaataagctccattactattagggcctgtcttcttctctggcatttctcacactactgaaatacttaacacacaggtcttatgtcacacaaaaaataaagctcttttatatcttttactgcaaaaaagagttacctttaaagtctataatgttattttttgtttatttatctttattgtttataggaatttcaggttcataggaaatggtgccagggccagacagatgactcagagaataaaaacatttactcacagatttgatcacctgagctaaatatgctgattcaataaagtagcacacgagttgtcctgcgacctccacatgaatttcagtgcatacacgcgcatgcgtgcacacacacacacacacacacacacacacacacacacacacacacacacacgagagagagagagagagagagagagagagagagagagatgacagatgataatttaaaatgaataagtagtgtccaaattaaagttcccatgtgccatgtccctcactgttaccatctcccactgcagtcaggcatttgctgtactcaatgaacatgtgtttaatattgatatgtatttgtcagctaagtacacaattcacattagaattttctcttcatgttgtacattctctggtttgggacaaatgtgtaatatacatgtctaccattgtctactgtcctgaaaatgacatgctctttacttgttcctctacttccttcaagttcatgtgacccttgatgcttttgtcctccacatgtttacttttctacaatgacaactggcactagacccagagagaccatctctcctcatggcccaacaaaaggctcaagtctaccagcaaacgcaatctttgatttgcatggagaaacaactgtgattggaggaagtacagtttcttatttgcattaaaatactgtgccttgattggtgcagttacttgatgatgtgtcttgatcacttcaaattctcttctgtctgtataagcaggaaatcatttccctttggaagtatgtgggaaagcccactctggtttaatccatgctattgcaacattaagctcaattaaaggattctcttaaatggccctttcttgtctcttgtttttcactggttaagtgagctgagctggcaacatcaagaaatgtaagaagacagtgatgaagacagagtggtgggggcgacagtattagtgacagtgtggctgtggtgaaagagaaactggagaaatccagagccgatggacctgaaataaagtcagagatgaagactattaggagctgaagatgtgacactgttgacgctgacaactgggtgcattccagacagctgtcaatcattatgtgccaagaattccagcaccctagccaaagagctgtgacacttgccactctcaaagtcccggcatcataaaggcattctatgcttgctaatgtctttcacctgctgcttccagaagctgttgattacaaaaacttccaagcacaaggacagcagttggtggttaaagcccagaaccacaagtctctgatctgaaacctcaggaccacaagtctttggcttctggaaggtttggagtttgtaagaccctgggtatattagactacatcctaggtcttgagcctaatactaccatgaaaactctatctcagctgtccatgattcctaaccaggtagagcaaaagaaccttgtccagctaattttaacaccctgatatgtatgcaccaggtatgtgagttttgtgtctaatggctagtttacacctatttgctccaaaggtcataaggttgggattttttgatctagtgagattcataagaaatgaatgtgcgcttaactaagcttggttgattttgtttgtttttgtttttgtttttcatagtaactacagtgtttcagggaagtaaggaggtttcaccagcctggtgattgaaagctatgaacaacactgggaagaggcctagggagtcagcacagcgagaggtatctagtgctgcccaagatatgaagtaactctcacagtgccatagtccctggtatctttacttatatcctgctgttcggtttctgatttactcattgatctgcctactcaaaccaaacaatcacattgcttgccatgtcgaaagtttcaggatctggacatcacagcagacatttccagggaggtgaatcctggagattcattaattaggaaccactccatagtgttgtcctcttgttttttttattattaattattgatttaagtaatactctcctctgcggtaaaaagtagcttctttgaggaaggatgactgattggataggtattagaatgaaatgcagtggacaattatacctgtctatgaaaatgacagtgattgttcttcatccaggcatcatagtctcattatccaatagctgactgggatttcagtaccagaaatgatttccctcctattgagagggccttaattccaatttgacaattgttgcttaacccccccaaaaaaagtgtcaccattgccccactagggatatccttctgtgctgcttgtcgttattcatagactttatagctgggaaggagtattaattacttttctcctgtggcagcttgcataccaccttcagataaactgagaaatagtccacaaactcttcatgtctcttaactccatctatctagattccatcacaaaaacacaaatatgaacaactaggagaatatgactcttcctaaacacagcaatcccatttggaccaaatgaagcataaaacaaagactttgacatagcaattttaaatgtatgaggatataaaaaatcctttgtaaagactgaaaatacaaatagttaaataaaataatggaaacaattcaagacttgaaagtagaatttaacaaagacatagaattactaagaaaacctaaacttaaataaaactgaaaatgaaaaaactcagaaagtcaaacaaaacctccgatgcaagtctcaccaatagattaaaagatgtgaaatagaaaatttcagatcttgaagacaggaaagaagaaatggatagtttatcttagtcaaagaaaatgttaaatacaaaaccaaacacaattaaaagttgtacttgagcaagttatctgaagtcagtgtccaatacgcctataacctatgttccaaccttggataggcatgcgtcctctgaacctatcctagttacagagcagcacggtgtgtgtgtgtgtgtgtgtgtgtgtgtgtgtgtgtgtgtgtgtgtgtgtgtgtgtgtagaccaagaagctagaaaagagaacatgaggaagttgtaaagtcaacgtgataaaaaaaaaaaagcagaactgggaacaatcttgtagagaagacaggaaaccagcaagaatgcgtgggagggcacaaagaagacttcagggtggagaatgatgagaaaaagtatatgaagcatgtttacagactgtggttagcaatctttgttagggtagctggaagatagatggtaaaggtatctgtgggtgtgctgtcattccagggaaagttacagagcaaagatcttctgtgaaaagaactaaagagaaaaagtttctatattttctttgactttgaaaataattacccaggtgtaaaggagaacaaactttgttttttttcctttgtaagcagaagagctcaagcaaaaactctgctcctacaatgagaagaatgaattgccccagagggtgtctcagcttaggatgacttcacctaccagcagagatactactgagggtcaacatcagacttctcagagctgttcttcaggtcttgctgagagtcatcctcagaccacttctgttgccactatgagtcaatctcaggccctttccttgaatcccccaaatgcttccattcattcctcatcaaatttatgattttctgtttcatttctgatatcttcataatttcattgcaatggtcacaaccttgaaagaattcccactaatttaggtattttgtatgttcattgggtgtatattttgagacactgactgcaagtgacataaatctacttcttctattgcattgtatcattacatcagaattcactatgtaggtaagtgtaacttggaatttatcacagtgcagtttggaacacgagattcttagtcacatctatttgtattcataagtaatgacagtaatataactaaagccagatttaataattatttgattaactaattatttagattaaaaattaattgatttgatttagtaattatttggctttggatgacatcagctttataaagcaattttctaagagaccttgcatttggaagactggtatccttatttgtcataatcactcaaagcaacaagcattagtgaacaatacatttataaggaaggatttgcatagcaacttgcctttacttttaaaataatgaaatttagaatctttatagttttataattcctgtaagtttttaaaagtgtattaaagaaaacagaagtatccaaagtacatcttttcttgtacatgcatacattttgtttaagtaatgtcatgatcccttaaaagacttttttccttttttatttaaattagaaacaagcttgttttacatctcaatcccagttctctctccctccctgcctcctctgccccccaacaacccctatcccatcacctttttgcttcacagggaggtgaggccttccatggggatcttcaacgtctgtcatatcatttggagcagaacctagaccctcccccatgtatctaggctgagagagtatgcccctatgtgaggtgggctccaaaagtccattcgtgaactagggataaatactgatccactaccagagggcctatagattgcccagtccttcaaactgacattcacgttcagggtgtctggaaaagtactatgccggcctcccagctatcggtctggggtccattaggtcccccttgttcaggtcaggctgtttctgtgggtttctccatcctggtcttgaccccttttgtcatcactcctccctctctgcaactggattctaagagttcagttcagtgtttagctatgggtgtctgcttctgcttccatcagctactagatgaaggctctaggatggcatataaggtagtcatcaatctcattatctgggaagagcattaaaggaagcctctccattattgcttagattgctagttggggtcatcgtttaagatctttggacatttccctagtgccagattaatctctaaaccaataaaggctccctctatgatggtatctcttttcttgctctcctctattcttaccctaactcaatcttcccgctctctaatgtcctcctctcccctcctcttctcctcttctctttctcctacctccctctacccttccccatgcccccaattagcttaggagatcttgtcactttccccttttccggggggacaattttgtctttcttagggtcctccttatttcctaacttctcttccagtgtggattgtaggatgctattttttgttctaggtctaaaatacatatatgagtgagtacatatcatttttatctttttttgtgactgggttaccccactcaggatggtttcttctagtttcacccatttgcctgtgaatttcaagattccattgtttttttttccacggagtagtactccattgtgtaaatgtaccacattttcttcatccattcttcagttgaggggcatctaagttgcttacaggttctggctattacaaattatgatgctatgaacataggtgaacatatgtccttgtggtatgaatgtgcatttttgggtatgtgcctaagagtggaattgctggatcttgaggtagactgattcccagtttcttgaggaacctccatactaattttccaagtggctgtacaagtttgcactcccaccagcagtggaggagtgctcccctttctccacatcctctccagcttaaactgtcattggcattttttttagccattctgacaggagcaagatggcatctcagagttgtcttgatttgcatttccttgatggctaaggatgttgagcactttctatgtgtctttcatccattttggattcctctattgagaattctctatttagttctgtaccccacttttaaattgaattatacaatattttggttactagactcttgaattctttctgtgttttggaaatcagccctctgtcagatgtgaagttggtgaatatcttttcccattctgtcttttcccattttgtcttgctgactgtgtcctttaccttatagaagcttctcagtttcagggttcccatttattaattgtcagtctcagtgtctgtgctactggtattatatccaggaggtggtttcctgtaacaattccttccaggatacctcctactttctcttcaaagaggttcagtgtggctggatctatgctgatcaatttggacttaagttttgtgcatgacaatagatatggatctatcagcattcttttacatgatagcagccagttatgccagcacgatttgttgaagatgctttcttttttccattgtataattttagcttctttgccaaaaatcaggtgtttgtaggtgtgtgggttaatatcagttttcaatttgattccattggtctatctgtctatttttgtgccaataccaagttgttttcagaactacagctttataatagagcttgaagtcaggaatggtgatgccatcctttattatacagggttcttttggctatcctggtctttagtttttccatataaagttgagtattgttctttcaaggtctgtgaagaattgtgctgctattttgttagggattgcattgaatctgtagattgcttttggcaagattgccatttttactatcttgatcttacctatccaagagcatgggagatttttccattttctggtatcttttttaatttctttctttttaactcaaaattcttgctgtacaggtctttcacatgtttggttagtgttaccccaagatattttatgttgcttgtggctattgtaaagggtgatgtttctctgatttctttctcagcccatttatcatctgtatatagtagggctactgattcttttgagttaatcttgtattctgtcacttttctgaaggtgtttatcagctgtaggagttccctggtagagttttttgggtcacctgtgtaaattatcacatcatttgtaaatagtgaaagtttgacttcttttccaacttgtatccccttgaactccttttgttgtcttattgctctagttagaaattctagtgcaatattaaagaggtatggagtggacagccttgtcttgtccttattttagaggaatcacattgagtttttctccatttagtttgatgttggctattggtttggtgtatattgcttttattatgtttaggtatgttcctgttatcactgatctctccaagacctttaacatgaaggtgtgttggattttgtcaaaggctttttcagcatctagtgagatgatcatatggttttccttttccagtttgttcatatggtggatgacattgatggattttcatatgttgagccataccctgcatccctgtgatgaagcctacttgattacgttgaatgattttcttctgatgtgttctcggattcgatttgcgagtattttttttttgggggggggtgttttgagacagggtttccctgtggctttggaggctgtcctggaactagctcttgtaaaccaggctggtctcgaactcacagagatccgcctgcctctgccttccaagtgctgggattaaaggcatgagccaccactgcccggctgattttcgagtattttattgaatatttttgtatcaatgttcatgaggaatattggtctgtagttctctttcctagtcgtgtctttgtgtgtctttgggtaccaaggtaattataaccttataaagagtttagcaatgacccttctgcttttctattgcatggaatactttgaggagaattggtattagctgttcgttgaatttctggttgaattctacactgaaaccctctggccctgggctatttttgtttgggagacttttgatgactgcttctatttatttaggggttatttaacttgcttgtctgttattgatataattttaataagtgatgtatatccagaaaactgtccacttcctttagatttttgaatttttgtggagtacagattttcaaaatatgacctgatgatttgctgaatttcctcagtgtgttttgttatatcccccttttcatttctggttttgttaattgcatattcattctctgctgtctggtaagtttggataaaggtttgtctatcttgttgattttcttaaagaacaaagtcttttttacattggttcttcatattgttttcctagtttctactttactgatttcagtcctcattttgattattcactgtcatctactcctccagagtgagtttgcttctttttgttctagagctttcagttgtgctgttacttctctagtgtgactattctccagtttctttatgtgggcacttagtgctatgaactttcctcttagcacttctttcacagagttcctgtaatttttggtatgttgtgtcttcattctaattgaattttaggatgactttaatttctttttttatttcttccttgacccaggaatgatgcaactgtgcattgttcaattttcatgagtttgtaggttttctgcaaatcgtgttgttgttgaattctaactttaaagcatggtgttctgataagatacagggggttattctaattttttttgtatctgtggaagtttactatgtagccaagtatgtgattgattttagagaaggttccatgtggcactgagaaaaagctatattcttttgtgtttggatggaatgttctatagatgtctgttaaacccagttgggtcataacttctattagttcctatgtttctttgttaattttttgtctggtggtcctgtctagtggtaacagtgggatgttgaaatcttccactataagtgtgtgatgttttatgtgtgatttaagttttagtaatgtttcttttacgaatgtggatgcctttgtatttggggcatagatgttcagaattgagacttcatcttgatggatttctcctgtgatgaatatgaaatgacttccttcatctcttttgattgtttttagtttaaagtctaatttgttaaatattagaatagctaccccagtttgtttcttgagtccattttattggaaaatgttttcccaatccttacctctgagataccacctatctttgaagttgaggtgttttttggatgcagcagaagaatggattctgtctttgcatgcattctgttagcctgtgtctttttataggcaagttaagaccactgatattgagggatattaatgaatatcgtttgttcattcttacttgttttggatttgttgttgttggtattgtgtgtggacttccaccccttttttcttttggctgttgataaagtaggattatctattgcctatgtttttgtgtgtgtagttaacttccttgggttggagttttccttccagaacattctgtaaggctggattattgggtatgtattgtttaaatgtgattttgccatggaatatcttgttttctccatgtatagtgattaaatactttgccggttatagtagtctgggctggcatctgtggtcacttagtgttggtagaatatctatttaggaccttctgggtttcagagtttctatggagaagtcaggtgtaattttgataggttttcctttatatgttacttcaccttttttctttgctgctcttattattcgttattctatgtgtttgggggtttgattattttgtggtgaggggacctttttgtggtccactctatttagtgttctgtatgcttcttgtactttcattggcatgtctttctttaggttgggaaagttttcttctatggttatgttgaatatgtttttttcaccttgtggtgggtttcttcacattcttctatacctattatttttaggtttggccttttgacatagtcctatatttcctgcatgttttgtgttagggatttattggacataagattttctttggtgaatgaatctatttctcttagtgtatcttcaacgcctgagattctctcttccatctcttgtattctgttggttatgcttgcatctgtagttcctgatagtttacccagcttttctatttccagcattccctcagtttgtgttttctttattgtctctatttcagttttcaggtgaactgtttccttcatctgtttgattgttttttttttcttggctttctttaagagatttgttgacttcttgtatcctttagtttgttttttcttctatttctttaaggggtttctcatatcctctttgagggccactatgattttcatgaagttgtttttaaggtcattctcttctgcttcatcagcattgggattttcaggtcttgcttgtgtagagtccctagactctggtggtgtcatattgttttgtctgttgttgaatatgtttttatattgtcttcttcccatctcttcttctagtggctgcaggtggaatcctttcctttcctggtgggtacgggtccatttttcccttctggtcattgcaagcaggtccaattctccaatggctctcctcttccagtgggtggaagtgggactagaactggaacattggaagacccctgggtaggctgttctgcaggggcaggttcccctgtgcaaaggccccaagcctcaagaggatcttagaagtgcactggaaggcaggctggaaacatgcctatcatgggtggaggtgggactagtttgctggaagtctctggatgggctggaccacagggatgggtttcccagtgcacagtccccaggccttaggaggctcggagcagtgcaccagaaggcgggccagagcccttaaagagcccttaaaagactttaacctaaacaaatattgaagtgagtcctatcttggttttgtgtatgactgttcagcaagctgtgtggctcagaggcacctcctaaaactgattggtttctaggtgtgtgtgtgtgtgtgtgtgtgtgtgtgtgtgtgtgtgtgtgtgtgattgctgtcatatttctctttcagctctgtggtcccctgctgtttcaaatagtttcccctgaaatttagaaatagtgcaagaaggccagatgtggtgaagcacaattgtaatgctttataaagctacaaaactaggtaggcagaggcaggtggacctctgcaggttccaggcaagcctagcctagattgcaagttccaagccaaataatgagaccctagttccaaaagaaagcaaggaaggaagggagagaaggatggagggctcatgactggactcatgaagttattcacaagagcacctgattatagactatgtggccttggatgcatctgtgtcccccctaatatacaacccattatctactatgtaagattagtatcagctggaattacaacctaaatctctatttcttctattacctaaatgatagcacatttaacattgtttagattttctccattctagccaatgaaggttttaactctgattttcctgtttatgttctttgtagaataaacagaggtaaattctacctaatgaaccttctgaggaagatggtttacatgaagataccaaacaagttatggtgttagaagctacaaaagcatttacttgtgtcattacaggaaataaaaaaaatgttccatgccacagtggttacagtggagactgaattcttcagagtgaaggtgtttgaaaaaaacctacaggaaatgttcactctaaaaagattcattgttttcttggattattttggtagctatgggtctctagtgatacacaaagcctccagtgtgtctgaggtgactaatattggaagtatggaaatcttaaggtcattgagtaaagaaggcatcccaaatcctaaaatccgtgagcttcaggcaataacaagagaaatgcctgtgaatggaaagtttaaaatatgtgaggtaagccattagactattttgtaattcttcttctggaaattcatgttaaatcctaacttggcaacagtaacattgtcaaattactgaacataagaaacataggccttctgtataagtgaaagatgtgtagagtttccaaatctggtgtgtgatatcgtctcttttaatattttttctcaggttaacaccatgaaaattctttagaaagagagtcatcaataacatttggcattttcctggccatgaagatccatctaccatccttccctagtcccagacagttcagtttatacctcactttctttttaaattttatatcgttgatagcttcctttcctgtcttacagataatgcaactgtgaataaagaatcaaaatcctagcctagatacaggttaagacaatgagaataagaaactaaacagaaaattctaccctagaatgcagctatgtccaacaagctgagattctgacacccatgtctttaaattgttctcacttctattctttacatcaaggtcttgatgaggaagtgacttctgctttaagtaaaaagacaaaaagaagtttagctgactggagaaatacagtttaattccttaatttataacagaagacaacaaaagcaagagctttgaagaattctggattccgggaatatctttaagtgccaaaaccccacaaaatagcatgcttagctgacttaaccacatgtttatattcttccatattcttttatgcatgtgttcagaggtgtgtttttaatcagttttattggtactgcttatctatagcttctttaaatgaatatgaatattcatgtgtctatacaactaataagtaaattgaatgtgaaccaaaagagcagagttagatgatgtggctttaatttttgagagctatacagtagagtgaatgaatgcacacactgactaaatgtggtccatttaaatgagaattgcaatagtcattcttaggctctcaagtgagctacagcttttcttctcaggtctcccaaatgtacttagggaacctgaaaaggtaaccagctgggttttttgttgcttactaatatacttttgttgtgccttttgtttttgttcccttccttttgctcattaagaaatcttagctcttctcataaggtagcaccagtacttaggaagatactcagtttttctagagaaagtttcaaaggaagaattttccaaaatgaatatcttaagctgttttgttcctgacattcattttgtttttaattttataaacagggtttctctgtatttctttggaagttgtcctggaactcactatgtagaccaggttggccttgaactcacagagatctgcctgcctctgactccaactttagtgctgggattaaaggcatgtgccaccaatgcctggctcctgacattcaatttttaaaatgtttactacataattgtatttattttgaactaatgaattaatttttatttagactgtgaggcttgatgagaagcactaattccatggtgctcctgtggagatctgagaacagttctgagaataggttgttttctaaatcatgaatactgggattgaactgaggttctcagacttgacaacaagcagccttaccaactgagtcatatcactgtcccttctgcctgcaattctaatcataatatacatatttgctttgacagagataagtatctctgaacccacataatttctcattgaggtgataaattttgacacgtctcagaagattaatttcttttgcagaaataaaatgggaaaattgtatatgttatggaattaaggattatacaggtcaaatgaaagtggcagtatctggacacctgaccaatgtcaactgtaatattggtgacaaagttagacttgtctgctttgaactgacctcagatgtgaatgagtggtttctgagagctgtgaggtacagttacatggaggtatgtactttagggcaacaatattcttcctaataataatttcagttaatactctaccaaaacttggctgctggtattgtgtaaaaaattcaaaaggtggcaggaaaatttagttttttccatgtattgagggtactttttcttataatttataaataagtgtatttttaaatcatagtaaagagaagaaatttggagaaactctcaaactgtaatcccccaagataaataataaaatagttatatttacccagaaagatgtattattcagtaaaaatgtggattaattttttcaaattctggctcattggttttacaaattgaccacagactcaaggaaattcaggatcttcagctaaaacatggaaatgatatccatcacagaggatcaagagcagaactcacagcacacctaaactggcaatgacacccagaacaaacttaagccacaaaggcactagaatctactctctttaccaaattgacatatccatgcacatagggcatttagtacactaaaataaactaatgtaaagttggacttgaaaacaaccaaggctgacttcttgggtcacacagaaatgttatgagatccctgttattctaagaatcctcacagtttcctgactttgtcccccagcaggtacaccagccatgcctttgtgctctcctcccattttccacagtgagaatttccaaacatcttactttaggtactacagcttctttctcccattacatcatgctacctcctacttttctaccatgtccatgattgataagagtgcatagcacatgtcatggtctcatgtaagagagaaaaggtgaatcacaggaggaaaaattcattaaagaaggcaggcaagagtgaggaaagagagttggctcatggagacaagatagtgtgaggaagggaaaagtgtgtgaccacctgcataacaactgattagccttcatcactttctattcaaagtcatcaagcctaaaaaggaagaataatgatgcaaccctaattcaatcatggaaatttctagagtcctccttatgaaaacgtggatgccactcaaaatggggataagatccaaatacaagaaaaaaatatatacatgttaaaataaatacatacagaagccatctcttaaatataggaaataatactttttaaatttattctttatagattgctgcaccatctacctttcataggttgcatgtttaagtttcataatatgaaaaataaactcggtatataaagcaatacttccagcaattaatttcttagatccgtgagttgctttaaaataaatatttggtggtctgctactaccagaatggaggaagattcctgtcaagcaatattcaaatttatgttttgagtgtgatatttactagaaaggccttctgtaggaaggaaccggctgtgtcatcagagaaatcaaacttaataaaagttaggtagggactgaaatgtggcctagaatatagctgaaggatgcaattcctttaattattttctctttgtacattccagtacattacacagtttagtcatttgaagtaacaactctataaattaaagattctatgactgcaatcttctatttgcaactataaggaacgtcatctccaatattaggcaaaataatatcagaagaagtcttgagagtacaaagaggaagttccaagaataaagaaaagcaataatagtaataataacaacaacaaaaacagtaaactactactcaggacctgaagtgaaggctttattcatgtattacttttcccattgctgtgaaaaaatacctggaaatcaattaaaattaagtaactttgttttgcttcacagtctaagtgtgagatacttggccccattttgtcctgatcaggaggcagagaataaagaaggcctgaatttacccaagatcctaaatcccattcaactggtctacaacctaagaagttgaggcaactaacatgctcattcattctgtataccactctaataacatttattcaacacatcatgcatgtttctgcttagactttaaaacaaaaacaaaaaagtttccttcttcctggaaatcttgaaacttaaacaaactatcctctcttctaggcatctgtgttaagttctacttctcaggtagtactccatttttattgtgtatgtcatttgtataaatttttatttcaccctgcagttctattcacactgcaaatttcaaaggaattgatctatccgactcattatctactttagtgagttaagtggtggctcaagcccctaatataaaaggagatggtcttccttaataaaaagaatgcagtctaggaccagggaagctggcacaggaatgcatagacagtctctaggagtcctggtatacaatattgctttacattaagcacacacctttagcaaactatgagagtcttgtataatactctacaaagggaatcttgcatggtaacattatagttctgtaactacagtctccaagtggatgggatgcaaagacgggtgaaggaagagatgagaaacagtggcagctctgataagaagtgatgcactaatactgcgatgtatctgaagaatttgtaacaaatacttcttagtgagtctcagtcaatggtgcaaagggacacatgactaagttagaaaattctcccccacttgagttttatttttatggtctcatgaaagctgagatatgcatgcatctttctccccttctggatgacactgtgctatggtgaatataattcaacttctggaaaatgaaaatggtctttatcatcacagacacaaagcctgtaccttgaatcattaggtcagataaatccattcacttagtttggggcataatcaaactaaaatgtaatacagggtatacagcaatagatttttaaaaatatttttatcattttttgagaaatccatgtattgtattttgattatatccccccttcaccctccacaattcctgttatctagtccattctatacccaccctactttgtgtcttcatacattttttttaaatcaatccaattagtgtaccatagactcttaaatgtttgcccattgagtggggcatagacaccctatcaggtattgcactcttatagaaaacaaactcttcctattataacagatttcaattaccaatagcacctcaactagagctggaattgtttgactgtctaccatttccatggtggtattttgtctgacttaaatttgcacggttctatgcaaactgtcacaactactatgcgttcacctgtgtaattgtcctgttgtgtcaggaaaactctgtgccactatagttatttccatctctggctcttctaagtttttgctagctcttgcaaagatctctgagtttggggaggagggtttgagatacgaatgtaccatttagagccgagactccaccatcgcttactctcatcaccttggtcacttgtggttctttatgttaatcatcatatccagcaaaaaggagcttctttgattaagtttgagagatatactaacaaatgtgaaacaagaaattatttggattgagtttaatactatatccctttggaagagtaatataaataaaacctcagtttaggtctatgaacactctatccctaggtttgtagtcctgataatggtgtcagttgggccttaaatcatataagaaagtattttgttactcctatgatttgcaggaaacagttgcatgaacggctgtctcttgctgagcaggtcattactgttgcatgcagagttctcaaatatgtaagactgataattaactttccccatcactagcatgctttccctcttctggctctatgaaaaatatccataataaacagagcttctaggttgatgccagcttgacttctccatgttgtatgtatgactaaattatgctgggtttttgtcaaatggattttatagctaagatctaaccagaaatgaacctaagctaggccaagcattcaaaactaataataaatctccgtgacatggtttagtggatggttggtgaccttaaaataaaaagcctggtacaaaacccaaaactgaggaaaaactggaaatgaaaagtttaggaaatggaacaggaacctcagaagtaagcatcaccaacagtatataagaaatggaagagaaaagctctagcgtttaagacagaagaaatagataccttgaatatgtaaatgttaaatctaaaataatcccaacacaaaacatgcaggaaaccatgtacactatgaaaagaccaagtctatgaatagtaagaataggagaaggagaaaaaacttaggtcaaagctatagagaataattttttaaagtaatagaagaaactttccccagcctaaagaataaggacaccaaatatgttagagcagaaaagaaattccccttaacacataattaaaatattaaaccatagaacaagcaaagcatgtttaaagttgcaaggaaaaatgggcaagtaatatataaaggcagacctattagactaacacttgacttctcaatggaacccctaaaagccagaaggaccttcatagatgtccaacagactctaagaaataacagataacacctctgactaccattctacccagaaaactttaaataatgacagacagagaagatatgactttccatgataagatcaaatttaagtactatctatctacaaattgagttctccagaaagtgtaaaaaggaaaacttcaacctaaagtggctaaccatacctaagaaaacacaaagaataatacaaagaataattaatctcagacaaccaatttaaaaaaggatggaaaaaaatatcaaacagtcaaataacagttattaacaagcatggctcattgataactctaaccataaattgtctcgattacccaatagaaagacacagaatagcagaatatatgggaaaacagaatacacccttctgcagggttccagaaacacacctcaacatcaagtatagacattgcttcagtgtaaatggatggaaaaggatgttataagcaaatggaactaggaaaaaaaactgctgtagtagccatttttatatctagcaaaatagacttcaaatcagaactaatcaaaagagatagaaaagtacactacatactcatcaaaggaaaaacccaccactaagtggactttgcaatccttaacatctatgtaccaaatgaaagtgtaccaagttttaaaaagaaacactactatagctttaatcacatactgatcctcacatgctgatagtgggtgacttcaatgccctactgtcaccaatagacaggtaatcaaaacaaaaactaaacagagaaatgctgaagctaacaaatgttatgcaccaaattgacctaatagatatttacagaacatttcacccaaaggcaaagtaatgtgccttctctgcacaccacggaacatttttctaaaactgaccacatactcagatataagaagattgaaatcagtccccgcatcctatcagactaccacagattaaagctcgataacaacagaagcaacagacttacaaactcatgcaaactctctactgaataaaactgcatcaagacaaaaataaagaagaaattaaactttctaggtttggagaaatataaatacaaaaacccacacttatgggacacaatgatggtggttctgagagtcaaatccatagtactaaatgtctacaacagaatggtttcttcgagttccatccattttcccgcaaatttcaagattccattgttttttttctgctgagtagtactccattgtgtaaatgtaccacaatttctctatccattctttggttgagggacatctaggctgcttccagtttctggctattacaaataatgctgctatgaacatggttgaacatatgtccttgttatatgaatgtgcttcttttgggtatatgcctaggagtggaattgctggatcttgtggtagactcattcccattttcttgaggagtcgccatactgatttccacagtggctgtacaagttggcattcccaccagcagtggaggagtgtttctctttctctgcatcctctccagcataaactgacattggtattttcgattttagccattctgacaagagtaagatggtgtctcaaagttgtcttgatttgcatttccctgatgactaaggatgttgaacactttctcatgtgtctttcagccattttagattcctctattgagaattgtctatttagatctgtaccccattttttaattgggttgtttggtgtttgggggactagcttcttgagttctttgtatattttggagatcagccctctgtcagatgtcgggttggtgaacatcttttcccagtctgtgggtcgccgttttgtctttctgactgtctcctttgccttacagaagcttctcagtttcaggaggtcccatttatcaattgttgacctcagtgtctgtgctactggtgtaatgttcaggaagcagtctcctgtactgattgattcaagggtttttcccactttgtcttctaataggttcagtgtagctggatttatgttgaaaccattctgaacaaggtaacccaatcacaaaaagacaaacatgatatgtactcactcatatatggacctgctttatgatacacagtaatgaccatgctttatcagagctgtttttaatgatgttgctcagaatggtttcctcccagatgatgactgagaaactaattttaaaaaaatggtaccaagtaccacaagagtaacagaactgtgctgtcttctgggattttgctttttattttttttgttgttgtttgtttgtttgtttgtttgtttttgtttggtttttgtttttttaaaaatggagtgtgctggatgtctctacaattttgttcaaaggactacagaacctagaaaagctgttgctactattgatgcataacatattgccattattgctctttttatataaatataaatatatacatatatataagctaaaaaataaaaaataaagtgtctacaacaaaaaaattggagagatctcatatttataacttcagaacaaacttgaaatctctagaacaatagaaggaataatgcctcaaagtagtagacaacaaaaataataaaattcaagactgaaatcaataaaatagaaacaaagaaacaaaactacaaaaaatcagtgaaaaaaagaattggttctgtgagaaaatcaataaggttgataaagctttagccacatactctaaaacactgtaagcaattgaaacaaattaacaaaattagaaacaaaatgagggatttaacaagatactgaggaaacacagaggttcaaaaggacatactttaaaaaaaaaaacctgtacttcactaaattggaaaaatctaaaagaaagggaatatatattattatctaccagagttaaataaagatcagaaaagcaatttaaacagatctataccctcagtgaaacagaggaagttattgacattctcccaaccaaaaaagcccagggacaggtgattttagaatagcattctactaggctttcatagacaagttaattccaatactcctcaaattattccacaaaatagaaacagaaggaacataaagacctaacatagaaatagaaactcagattaatttccctgatgattatagttgcaaaagttctcaataaaatacatgcaaacttaatccaagcacacataaaaatattaaccatgatatgtggaaggaagtttctgtcttacctggtcatatagcctttaagtcccaaatagacacagagagacttacattagttataaactgtttggactatggctcaggcttcttattggctagctctcttttaattattaatccatttgtattaatctgtatatctccacagattacttggtcttggcttaactgtgatgcctgagtctcttgctttctcggcagttacatggcatctccttgactccacctactacctttctctatctctgtttggatttcttacctggctacatcctgcccgtccattggccaaaaccaataagagaaatatatattcacagtatacagaaggacatcccccatcaatatcacaatgatcaagaaggctgcatgccaaagattccgggatgatttaacatacataaatttatcaatgtaattcagcattcaaacatactgaaagacaaaaaccacatgatcatctcattagatacggaaaagacctttgacaaaatccaataccctttcataataaaggtcctagggagactaagaatacaagggatatagctcatcataattaaggtgatttacagcaactccatcaccagtatcaacttaaatggagtgaaattcaaagcaattccactaaaatcaggaacaagatatgcatgtccactctctcaataccagttgcatatagtacttgaaggcttagctagagcaatcgacaacagaagaagatcaagggggtacaaattggaaaggaagaagtcagagtatctttatttgagaatgatctgatagtatacataagtgatcctgaaaatgccatgggtgggggggggctcctccagctgataattacattcagcaaattatcaggatgttaaatcaactcagaaaaatcagcagccttcctatatgcaaatggactaaacagaaaatcagggaaactaactttcacaagtctcaaataatatagaatatattggggtatctctaaccaagcaagtgaaagacttatatgataaaaatgtaagcactgaagaaagaacatgaagatagcagaagatggtaagatttctgtgataggttgaatgtaattggcccccataatctcataagaagtggccctatctggaggtatggctttcttagagtgcccttgatggaggaagtgtgtcactgtggtggtggccttgaagtttcctatgcttgggaactgcctgtagtagagaagtgctaatccaggcaggaagtgacatagcaaggagactcatatataagcaaagaaaacaggaaatgtccccctttttcgctcttcctccagcagcacaatgtgatccaccggcaaggagggacgccaataaggtgtccaataagataagtcttataaaatatataatttatgataattaagactgagctaacagatgggaatcctagtcattggccaagcagctttgtacctaatatgtctctgtattattttgtccatccacgaggcgggcagaactctggcagctggaggagaccgcccacgtggcgatagggctccaacggctttggaggaaagatttatcgtaacaactgcccagtgtctaagatgacttcctattgactgcaagatgtaggactctcagctccagtaccacatctgcctgcatgccaccatggtcctcaccatgatgataatggactaaacctctgaattgtccattgtatttatgattgaaaggtttcatttccatactaaaagaacttcagttcataatcattacttttttaaggctaaacctaacagggatggaacataaagtgctagtgttacaaaatctactaacttagtttaaaccgttaagaataatttaaaaatataagttaatggttagtcaacttataaatcagcaaattctttaatgtgatcaaaactatatttgtagtcatgatgagtattttttgtttaaattaaaaacaagattgttttacatgtcaatccccgttccctctcccctccctcctcccctgccccacattaacaccctacctatccaataccatttctggtccccaaggagagtgaggccttccatgggggttgtcttcagagtctgtcatatcctttgtgatagggcctaggccctcccccgtgtgtctaggctgagggagtatccctctacgtaaaataggatcccaaagtccattcctatgctagggataagtactgatctactacaagaggccccatatatttccaaggcctcctcactgacacccacatttatggggtctggattggttccatgttggtttcccagtgatcagtcttgggggccaagagctccctcttgttcaggtcagctgtttctgtgggtttcaccagtgacccctttgcttatcactcctccttctttgcaactggattccagttcagttcagtttttagttgtgggtatctgcttctacttccatcagctgctggatgaaggctctagcatggtatataagttagtcgtcaatctctttatcagaggagggcatttaaggtagccactccactgttgcttagtcggttaattggtgtcatccttgtagatctctggacatttccctagtgcctcatttcactttaaacctatactggctccctctttgatggtatcttattttgctctcctctattcttccccctacacaaccttcctgctcccttatgtcctccttaaccatcctcttcttcccttctcatagctccgtctcccctccccccatgctcccaatttgctcaggagatcttgtctctttcctcttcttctggggaccatgtaggtctcttttagagtcctccttgttgcctagcttctctggtggtgtggattatagactggtaatcctttgatctatgtgtaaaatccatatatgagtgagtgcatgccatgtttgtttctttgtgactgggttacctccctcagaatggtttcttctagttccatccatttgcctttgaatttcaagattccactgtttttttttttctactgagtaaaattttccattgtgtaaatggacaacattttctctatccattcttcagttgaggagcatctaggtttcttctaggttctggctattatgatcaaagacctcaacataaatgaagccacactgaacctcttagaagagaaagtgggaagtacccttgaacgaattggtacaggagaccacttcctgaacatcacacctgtaccacagacactgagatcaacaattagtaaatgggaccgcctgaaactgagaagcttctgtaaggcaaaggacacagtcaacaagacaaaacggcagcccacagattgggaaaagatattcaccaaccccatatctgaaagagggccgagctccaaaatttacaaagaattcaagaagctagtttccaaaacacctaataatctaattaaaaattggggtacagaactaaatagagaattctcaacagaggaatctaaaatggttgaaagacacataagaaagtgctcaacatccttagccatcagggatatgcaaatcaaaacaactctgagatatcatcttactccagtcagaatggctaaaatcaaaaacatcaatgataacttatgctggagaggatgtggagaaaggggaacactcctccactgctggtgggagtgcaaactcatacagccactttggaaatcagtatggcaattcctcaggaaaatgggaatcagcctaccacaaaatccagcaattccacttgtaggaatatatccaaaagaagcacattcatacaaaaaggacatctgttcaactatgttcatagcagcattatttgtaatagccatgatgaatattaatagaatctattccttacttagccccctggaatttaagatgtttaagcttctcatagttaacaaaactgccccatattttgcttgctgccagggctctgtttaaaccatgtacacttttggctcaatcgtcctgctttgtctggtcacagcagggtcagtcccccaaggtgctcttttacagagaaatttcagacctggatctgacagccaatggcctatgctgctctgtatggcagctgaagacctacaaccacagcctcaacaaaactatggagaccaccggagactaaggtaatctgtctgggtaatgggtgtctttccttttaattgacacataaaccatttagattatatttccagtcatggtttctccttttcagatctctaaagatattaactggctgtatctttaagcataacaaacatcttcccaaggcttcagctaccttctcagttttcttcataagaaaaataccagatcattgaccttgctttctaaagctaaagccaagtctaaaaacaattttcgttgctaccaaataagaaataatctcactgaacaggtttcaaagtaactttttactgttcctttgtttaaaaaaaatcttgttttcaaatgactaaatcaataatcaaccacatatatcacctgataaataactggatttaaaaacatgtaaagtttaaagtttaagctataaggattcaaaaaatacatttagttataaaacggtgtttaaaatatataagcacgcagggtgttggtggtgcacacctttaatctcagtactcaggaggaagaggcaggtggatctctgtgagttcaaggctaccctggtctctagagcaagttccaggacagcctccaaagcaatacagagaaaccctgtctccaaaaaaaaccaatatatatatatataaatatatacatacatatatatatatatatttatatatatatggtatgagaacacaaaagtttaatttattataaaaatgatttaagatacatgaaaaaatgtttcaaatctcttcccctctctatgctattgttatattgagactgcaaaagttcagagttttgacactaatcaacaaatatctgataaactatatatcttgctctggaaaacacttaacattattaccataataataaaagttgttttctaaatatagaatttttaaaaaatgtttctcattttgctaaaaactacacccagtcttctggataaagcaaaaaaaaaaattaatactttcaatgctttaggtttccaaacttctactatgactcaaaaacatgagtctactgcctttttctacacaaggatttcaatacagactacagacaataatagtgataacatatccaacttgcctctttaaaaaggttcttagaagcttcaggaaatcagcttgaatattccacctgtcaccttctccagagaagtgccaccaatcaacaacagcagtctatttacccacctacctattctgcagagggtgggacctcttcctctttccctggtttggggtacccctttcccatctgcctggactgtggagctggggatttcaaatgtacacctaagacaaaaatttgcccctaaaaattcctgggggtgtcgagcctccagcagcacaagactctaaaggaaccaatggaatcagcacactaggggaaaacacacacacacacacacacacacacacacacacacacacacactctctctctctctctctctctctctctctctctctctctctctctctctctctcttttgatggtttccttcggaccttttcgttcatttctttgtgattctgatccgtattctctcttctcttttcttatttctatcctttggagctctatgctgatggaggcttcccctgccctctggcaggaaatgaagttaaggaatgttaaaggagtgtcattctctgtgagattgtgggggtcaattacattcaaactgccacatggttcatcttttcctctacaggaaacacacaaccaaaaatgaggaacaagagaatctgacaagtttccctctgactgctttcctcctgcacaggaaaggaaggtgagatggctgagtgacacacttttatccctgtgtaatttcatcttcgttcagatgagtgtaagagacccttgtgtcagtctgtgggatatgaaaagctcaacattgaaattcgtgcctacttacatttgtaaagaaaagacaaaaaacggagtaagagcagctctgtttttatgttggtttccaccccaccccaccccacccccctgacactacattaataacagaaataaaatgttctgtttcaccagctggggaaatggaaagctaagagcactgctgggtggagtcctatttcatcacaactctccccaaggagatagcatggggtccaagacatctagcactgctcagattaggaatttactttagcctgttcccttgtcttccctgttgttttgaaaatactacgttttcttggcatttaatgagactccaacaccctggtgtgtaccttttgagaggtttttcttcctgcaaaagatagacaaaccccatttcctgccttgctgaggatctacagtctggatattaccgagaaatttccagggaggtaagtcctgcccttttgtaaggaatagatagctctttgaaccccacaagaacacagggaatcactagtggttcttccagtggagggttggggagcagggatggttccagctgcactaagagcagtgaaaccctgcagctggtttccactccttcatccaagaagatagcagacatctttgttcctccacctctggggcttgaggcaagaaataatgcattttgagtatagaaggttgcaaaataaactttctaagtgtaagtatgaataaatagaaaattataagggtttagttatcttggctggagaattagctgaaacctagtggctctggtgtgtgactgagtaaaggacaaggcagagacaggataaattatcatgaaataatattgagtgaaaaacacatctgcaaatggagctgtattatctagtaatatcctaatactacacagcatgagagccagcggacatgtgtagtaaaaattttctaagaatcacaaacacggttgttcaaatacatcctgtttttaataagcatattgaacattttcttttttttccttttacacaaggcagtaaaatagtaattagtcactaggagaaactttctgtcattatgaaatttattccttttgctcagttatattttatttggttttggtttggggtcttaagatgtgggaaacaaaggagagttaaatagaaatatatttctattgacaaattttagaatattttaaaacttttcatgtcctctcacgtagtactccatgtgtacttgaactttataatttaaatgtcaatttgagagttgtaaccgtattggatgcaatattgctaaccttatcagttatgctgctcaaactttctagattttacagatgtttctaccttactcattcaataattgatacactgctatattgaccacaaaactgtgggctctccttttgatgtttttcaaattcacagatatgtgcattctcacaggcattgaatatatatgatgaaatgtatgtgatgtgtatactgtattctacaatttcagagagctgtgaagaaacaaaataataacagatagcatgcacaatcactagtatataaatccatagttaaaggtattacctccttctaggatggcaggatttatcatattttggcatttggtaagaggttttaccttcaatactattaaagttccactaatgtagacaaacaggattgtctttagtttctagttaattttggatttttcccactgttaaagaatgttttattaacaacctagaggtacatttcttaaatagcatttcacagaagttgccgttggactggttaggtccttcgttgtggtctggtaatgagcaggttttggttctgcttctgttaccgtcatttcgctgtgggatgtctccatcttacaccaacaatctgtatgtcgtctttcatcagttcgccgaccatgttatgcacgtcctctctcacattttatcaatcaagtctttatttttaaacagagggggtcctaatcaagtttgtgtttttttttccatttttttaattttagaaacaatcttattttacatatcaatccaagttccctctccctcccattctcccatgccccccaccgaccccccaactcacccccacccacgcgctgaggatagtgaggccttccatgggggatcatcaaagcctgtcactttcttgggttggggggggctaggccttctttcctgtatctggactgcaatagtatccctgtaattcacttttctttagcactacacagaattccatttgtgcatatatatatgccatgcttccactatccatattcataatttggtgggcaactaggttgattccatcttctagttgttgtaattagagcagcaatgaatgatcctgtacaaatttctaagtattaggggatagagtcctttgggtgtatgcccaggactggtatggctgagttacatgataactctatttctggctctttatgtacactctgccctgctttccacagaggctgtaccagttcacattccctctatcagcaggtgagtgtttcccccattcttgtcatcattgtcactgtttttatgatggaactgtgcttcttctagctttttcttctatctaaaaactcttctcctccaggagccttgaagtgacaaagaaatttctctcattgttcaaaaacacattcccagaggaagtgatatggagctgagccatttaccattgcaacacaagtttccaaggtcatgggagcgaaaccatcaccagacaagggagggcgcagtgcccaatgacaactttaagatacagacctattgttagtagactagcaagtgaagaattagcatgcttttcttagtaaccttggtagacatctgtgaccctgacacagagtcaccatgtccctgttgtcattcaccacctctggttcctaaattttttcccctgtctttgtcaaggattggcacaaagaaggataagattggagattacttttctctgctggtagcatgcatagcatcttccagaaccatacagctagccagagggaatgtagcttcaaggtcagtaccagctgatggctccatgatctatgcactcatgtatgaggtgcctctatcaagttctggaaggaaaccaagagcactggcaatagactgtggttgaacgtggaggtttaaggttagaacacccatccatgaagacatgtaagaaaaaaaaactgagtcagccggcctctgtttttcattgtagagaagtatgtacaagatggaaacccttttatctcactatctaggagcaacaccaaaagttaagaacaatgggaggaggcctttctttttcagtcttcctctccccagaaaaagcatggcgcaagacttgcagggctgcataacttgaagtaaagtgaaatgattctgattagcattgttcttcccgcctttaagactacttcttgttcttcacagttcagggattgcaacatctctgtcgagactctgagagatttattcatttatcctcttacgctaataaaactagccctacttcttgccttgctttgggaagaaatttccaagaagatgagttctacctctgctatgcagaattgagagctctgtgaaacccacaagggcacaggggaaatcaggactggtttcttctgaggatagtagagggagcaggactggtgccagcttctctcaagggcgttaacccatagctgcttggttctgctgctttactagggaagatggcaaacatctttattccaccactactttaggctgaggcaacaaaaaatgcgttttgatttgggcagataataaaatatctcttaagtgtaagaatgagaaaatgcataaacacgagaggaagactttagttaatcttggctggagaatgtgaaagaacttcttagatatcatcattgattgtaaaaagataagatagagacgtgaaagaattactgtgatatagtatttagtgaaaaatatgtctggacctgtagctgcactctctagtactctgatatcacatggcatgtgaaacaattgaaatgtatagcataaagatactcagattcacacaattattcaagtacaagtttattttttaattagccacatccacaacatgttcaacattttatatcagtggtattttactcacagtgagttgatatctggcatcttgaaaattatttgttttcttttgttttactttatttggatttgtttttattttctggtagaaaaatgtagggtggccgatgggagacttaatcagaaatatatctctattacctctgtagcacaataaataaaagtctcaaagacagatttcggggtaaagcttcaagcagaagattaaaaatgcagagcagccagccactacctcagctcagaccaaaggagcaatcctcaaacttctcctgacttcactgctcctcagattcactcagactgctatctttcctcaacatggctagatactagctctcagactgaatgcctctgacttttatacctctcaaatcctgggattaaagatgtgaactctggttcactctctggtagcccagggtggccttagactcagagatctatctacctcttgatcctgagtcctgggattaaagttgtatgtgtggtttctatggctaacttgcatggctctttgctattttgatcttcagtgactttaataaatcataaacagtatatcaccccatgcctccttttagaatattttaaaggcttctcacttaccctttagtgtttttaatatgtacttgaacagaatattttagaagttgatttcagattgtatgtatataaggttatctttttggtgtatcatttttgtttctcaaatattctaattgctttgcaggtattttcccttgtttagtaattgagaaacacactgctgtgtctatcaaagtattatgggttttctcaaattcgcagatgagtaccctctttcacacacataaagaggatcgtgtgcatctgtgcacatttggagcattcatctatcatcacattttggttgtatttgaaatagttgtttcttcacaagtaccaccccaaataaaaactttctcttttaattttctctgggatctgaatgtcaatgttgtataaatattggaattctgctctgaagaagggagttttactattgagaataagttttaatctcctacttgaatatgtagatcatctatttttaaagtcttaagacttacacaatatgtttttttcttaatactctatcttccctgtcatgtgtcctagtgtggacattccactcatctttgggttttttgagaatggagaatggtcatttaaaaaaaaagcaaaacaaacaaacaaacaaaaacaagaaggaagaagaagcaatgaacaggcttagaaagtaaagtccaattacactaagaaccatacaggtgttattcccaaactgaaataacataaattggtctaggattttggatttattctattctctgaagatcatcaaggaagcatataaaatgtgaatgagctacaactcaggacactcagtctgtgggtgtattttgggaatttccagaaagcaatttttttgaaatttctaatttttgttattagttcttcacacattactcttctatgggttaaaagacatccggacataatattaagtttaactctactcttatttagcaacataaactatgaggttcacaaatagagaatatgagtagtctagtcacaggttctcagtcttagtaatggtgccaggtatgggtttcaatttatacaggccttaagtcaaattacaaaataattggttaatcccacaacattcatgctactattgcaccaaaaagatgtcttgccagactaatttttactgcagatcaaagttatcacaactgaggaaaattaatgattattttgctactccagtattatgcatagtaccttccagaattagaaaacctagccaggagggatgaggcttccaggtgagtatcaacttgatttctccatgttctctgactcaagaatgtggtgtcttctgcaatggagtcttactataaaattctgtcacataaccaagagccttttcaataggctatatgttggggggggtctatgagaactgactgtctaatgacttcgatagaggaaatacatttcaaaactgggcttttgtttaacctatggtgtttcatagaaacattggtaccccattattaaataatttcatgtaaattcttgatacacagatacatggtagatgataggtaggtaggtagagagagtttgactgatagacatgacagataaagtatatgtataatgtatattttaggaagcttattttgcataagtttctattttagttttttgaaatgtaattgttagttactcttctttatattccttccactaccctatcctcctactctgaaccccgtttaactcttaggttttcaaaattatgaaaaggagtcagagaaagaaatgtgagaatggctttctaaacagtgaagaagaaactctccacatcatacaacttgacagtgggggtatattttgaaacatatgatcttaggaatgaacataaatgtaaatggtaaagtgcagattatttgaggatttctgatatattttatgaggaaggagtatttttattttattttttccaacttttttatttgaattagaaacaggattgttttacatgataatcccatttcccttctcccacccgtcctcccctacccgcccccccccaactaaaaccttatctatcacatatcttttctggatggtgaggccttccatagggtgtcatcagagtctttcgtttcctttggagtagggcctaggcccactcccgtgtgtcttggctcaaggagtattcctctatatggactgggctcccaaaggccacacctatgctagggataaatactggcttctacaggaggtcccatagatttctgaggtttgctcacagaaacccttgggttctattccttgggtctggatcagtaccaagctggtattccagctatcagactggggagcaagagttcccggatgttcaggtcagctgtttctgtgtgtttcaccagcgtggtctggacctcggtgctcttcactggtccttctctgcatctgggttccagttcagattggtgattagttatgggtgtctgcttctacttccaccagctgctggatgaaggcatataagtcagtcatcaatctcataatcaggggagggcatttaaggtagcctctcctccgttgctgagataattagctggtgtcatctttttagatctccagacatttccctagtgcctgatttctctgtaaaccaaaaatgtccctctctattatgatatctccattcttgttattgtgtattcttcccctgactcatattttctgctccctcatgtcctcggcatccctcttcctctccccttcctctcattctcctagctccctccccccttttcccgtgctcccaatttggtcagcagatcttgaacctctccctttctccaggggaccatgtatgtctctcttagggacctccatgtttattagcttcttgggcagtgtggattgtaggctggtaatccttactctatgtctaaaatccgcatatgagtgagtatataccgtgttgtttttttgtgattgggttacctcgctcagaatggtttcttctagattcatccattttcctacaaatttcaagattccattgtttttttttcccactgagtagtactccattgtgtaaatgtaccacattttctctatccattcttcggttgaggggcatctaggctgcttccagtttctggctaaggaaggagtatttttaataagtaaagaaaccattaaatgatttggggaggatttgagcaagatttgtaggtagaacattttgtctacgaataagaatcactaagttaagcctgaaagataaaatcaagaaacttttgacataactccatccaataaattgtatggtgctactatgaaaattatgtagatgtttggggaattaacagtaatatcagcacaaaggtcccaaagagcacaatccaagcccagggatgacaggatgggagtaagtgtcatttgggggaaagcctagcagacaaggctcagaggctcagaaaaggccctgttacttcagtgattgttcttccaggtgcattgtaaggggatgcagtccttttgtgtataggccactttagaatgggaaaagtcagaaacccaaaggcagatatccaggaatgggcttcaacaccacataaagaatgggtaacagacccaggattttagcactcacagttgacactctaaacactgccacaattactgactcaaacacttttcttctaccacaactgccactggcctaagtcacctaacatggttaatggggaagaatttcttatacttgtttattaatacagaagttctatgtgcatttcacacagtgacaaagtttatctctcgtaagtaattatggacattatcaagtggggttattcactcacacaggaatttcctgtttggagaattgtctgtgtatgtgtgtaatgttgtgtccattttcatcttttagactcatccataatttgagagataatgaataaatacaagaaaattgttcttataaaaggatttgaggtcatggatgactaccattttaggacaatcaagtccttactaagaaaagaactaaatctaactaaaaagatgcaagatgattatgacagaattcagatttctgaccttatggaggacacattcccaaaagatgctggactggacaaactgatagaagtgtgtcaaagcatcaaagaacttggagatcttgtgcaaaagcttaaaacagagaaggcaaaaggtaacaagggaacacactggacacttaactcttctccaccctctccaaactttctaggtccatacaatgatcagagttgatatatcccctttccactgtgtgcctgagaaactataggggttgaagcatcacagatgttaaaaagtttatttcaagaaatcctttcttacaaaggaacttgatgtatttcagggtagacatcttttgcattggagataaataaaataaaaagcagttcttgagatagattagaacatccaacatggtaggaaaaaacggaaaatgataaagtgaaagttgaaaaaatatttaaagaatgtaaatagagtaaatgttatactcaattaacaatcttacccattatttaatatcttttctggcaacaaatgtaatctaatatttaagtagaagtctgtgtcctaaagatgaaatgaagagtaatttcttctttataaagtcagtggatttaaaaatattagatatactggtacagaactctgactccagaatttagcatgaggaagctctgacactctagtatctcattttacaagtttggaccggatttcctctcattggtttctaagatttgagtgtatcatacacaaaacatgactagttgatatgataaaattttggatttttaagagaatcgtaggagaatgggaatgaataaagcttggctgatgtatacggggttcaagacaagaaggattttcttatagggaaacaagtcaggaaaatatcaagtaatgggagatagtgagtaaggttgtgtctttagtggtgtgtccctactaatggaataaacattgaatggacacagtggagaggaaatggcaggaaaaatagacggttcctagatcctctactttggtttatgtgggctcttttgttcctgcatttgttataatgaaaattatacctatcccagtaaaaccaaagaacacacaggaaaaaaagaagcaagaaacaaaccctgctacacctacgtcaactacaagcaacattttagcgtctgatggaggagagacatccacagctcaggtgagcttgaggaacagtagcaggctggcagtccacaggtgcagcaaaagtgcctcttcccctcctctgtccatcaaatactcattgctcttttagtttatcttcaagctttataaaactcatgttaagtgatcatgtggcattaatatgtgtttactcctattagagatgttgtatacttgaaaatgaggtagaacaatggttgttccttgtttacacaagacctagttttcaaattcgaattcagttatgttctaccatataggttaataatagaaaattgtgtatgtaactttttcctctccctttatttaattaaacatgtatatacatattttatgagtatttatgatcgtattttagacatggccagaagaaggtgggtgtcattccttcaagttcccaaaatattcaggcataataaatctagtatctaataatgaggacacactctactggcttgatactgagactcattaacagttcaatggatatactttcagaaaagaagaaatgtggataaagaaaagactggagtgaagaagaccaagaggtctgaggggccagatcaccttccctgtcctggagaaggcacagccagatgccagtccccaggtctcctggtttcatcttcggctccatccaacacttctttggctaaggtacaagttttctgcctctcttttatttcttcagtcaaaatattagaatcagatcttcatgttttgaccatgtccctcatttgtcactggcatttaattaatcagaaacacacagaggttggatatgatagagacagatcatcatacaaagacagaaacagacatagaaatataggtgaaccataatcttttgttgccctggggacacttaatgaacttggtatttcttctgacaatgagaactttcctggcttgtgttgagtgttgacccgaggcaggaagagagaggtgaagagtccagcatttacatgtgtcaatagcattgggctctgtttctcttctcttgcactatcccatatctcttcctttgatacgactaacatgttaataatttttctttaacacaaatcaggggtacttcttcagaatttttggcatattttatattcattccagtgtgaaagcctgtaaatgtgtgaacacatccatgctctgatttttaatgtgggtatcttgctctatccttaacatatcctttcagaagccctatccacacaaggttaacaatggacagcacttacctgaataaaatattcttttttgttttgttctttctttctttctttctttctttctttcttccttccttccttccttccttccttcctttctttctttctttttctccattcatctttctttttgtttgtttttcgagacagggtttctctgcagctttggaagctgtcttggaactagctcttgtagaccaggctggcctcaaactcacagagatctacctgcctctgcctcctgagtgctgggataaaaggcatgtgccaccaccacccagcaatattcttgttttattaccagatatgacacataaccaatgactttcccaggtttactgtgtattgtaagattatggttgccctatttttttctatagatacttacagacctgagatttccagaaatgtagaaatgacaatcagtatagctaagaaggatagatgagatctgtgcaatctagttaaggctctgatcagtgtcttgtgagacttagaggtcacaaaaacatgataatgtatatgaaatgggagtaattgactactttttgattggacttaaggtccacttgctgagatagaaccaccaccagactctgctaaaacagccaagaacctgagactagcaaaaggaaacatcagtttcctccaatggagatagtcaaccatagtctagagcaggctccatggccaggaacagctattttgttttattggggaattgtttttctgttttgattggttgtattttctatcttttcatttcattttattttttgagagtgagagaaagaacacaaaagagtgggaagggtggaggatccagaaggagctaagggaggggaatcatggtcaatatatatcatatgaaaaggttttaaataaaaataatagaaaatagaaattctggtagaaaaatacaaggtgaggaaaattaaagaatttttggaaatttaggaaacgtgtccattcatcagaaacatgagctgcaatttattatttcatgtttatcctttccaagtcagactaccttcacattagactttcaaatatttctcataacatgtgacaaataggatgattgaggcctcttattttttctcagtactcacctaaggaaacaaatgatttgtcacagaaggaaaaccacaaaattatcaccattcattctctggactctcactttcatctctctatccctccttctttacccccctcatttttttttttaatttgaggaaatatattcatccagttaagcaaaaacataagcaatttttacttatccaaaccttaccattaaaacaatttaaaagtttctaaagtctttaaattttaaaattagtatttttagatatttttgtaattatgtgggaaaatttttattctaatatcttacagtagttattacctgttttttttaatttaacataccagggctatccttccaagttcctaagttaaaatgcatataatattcaatggctacatcagtattgtgcttcttttgtgaatagttcattatagacatttttacctactgccacaaactcagctccactttcaatatttgtatttgaaatgtgtccattaagggtcattttgtggccttcataatagcctactaatttattttgtgcatatcctacaactttcttgttcatttaatctagtcgctgctatttacttacttatatacctatcactatcactagctatattgattttatgttatactagttggttacactgatgaaaaaatcagatacaagtgagctccaatcactaatagatgatgactgcatgtgacgtaatgctttgattattttcattccattgggtctgtggcaacaacaatgttatttccttatatgcaaatctatgaagttcatatcttttcattgctttgcgtattttgtcttacaggtaggcaatcttatctttattgaaatacttattgagtattactcagtaagctcagaacactgttcagaaaggagattagatgtctattaatatctttctagttttacaaatccctgctgttgaggaaaaatctctaaacatatttaagggcatgactctaccagtgtctatttaaaagaggtggttgtggaccagttcatgttgtttttggttatttgattacagcagattggtatctcctgaggagatacactgtgatttgtaccttcataagaaccccagatagtccagaggtatgctttatgtttaacattttctatttcaacaatatttaattttcccgttttatattcttctgccataagagtaaaggataggtttggattaatgataatttcacttaagtacttcataaaattgttctaaacagcttatgctgagttcatgctgagttctgcttttcagtgagagtccacaaacttctgtggctcaagcccattgctttaattcattagacttttggccagtgaaagacttcctctttaagggaggagtgatgagcaaaggggtcaagaccaggctggataaacccatagaaacagctgacctgaacaagggggagttcatggacccccagactgatagctgggaaaccaacataggacctaaccaggccctttgaacatgggtgtaagttaggaggcctgggcagtttatggggcctctggtagtggatcagtatttatccctagtgtatgaatggactttgggagcccattccacatagagggatactctctcagtctagacacatgggagagggcctaggcctgcgattgatatgtaaaataagattgtttctaatttaaataaaaaagaaacttaaaaaaataaaaaagaattcctctttagcatatccacagttctacaaatatattaaaatgtagcacaaataaaataaacctagagacagatattggggttcaaggtgaaaaccagaaaagcaaagcagtcagcctagagctctcacatctgcctaggctcggacaatcctagctccatgattcctcagtgtggctggaaactgaatgcccaagactgaatgccttgagactatctgatatatgtctctagtgctgggaataaaggcatgagctctgcttctcttttaaattgattcactctcatgttgccctgggtggacatgaactcagagatccatctgcctctgtctcctgagtcctggaattaaagtggtgagccaccactgcccagcttctatgactgtggctagatttacattctgatcatcagtagctttattagatcataaacaatatatcaccacaattcccccttttgtctaatacaaaagaagggtattactaatataagaaaaaccatgtgcagtgagtacaataagtatatacaatatatacaggcaattagtatatcattaaaactgttaagaccaatgttgagattgaggtttatgtcatgtgaaggttaatttgtatttgctgctgaatttacatgtttatatccctgcatttgttccacaacacacagaacccaaaccagagcactatcagaggtgctgttctcataaaggatcccatgatagtgatggtgctcaatgcaacagacccatttgagtacgagtcatcagaacatggagtgaagaacatgtttcatgctacagtggctactgtggaccagtatttccatgtgaaagttttcaacatcaacctgaaagacaagttcacaaaagagaatgtcatcataatctccaattacttcaagctcaaaggaaccctagatataaatgaagtttcctctgtgatggaagctggtcctggccaaaagattgaagtccccaataaggttatcagaaatgcaaatcaaactcccaagatttctgatattcacaagtatgcagctggagcactggtttatgggttatttacattacacatggtaaggaccgaaattttgtttctatctttttctccaccaacacctggaatcaaatatgataactttccagtgacagcttaatgacaatattgtaacacaggactctgtcttggctagtgatagaaggtgaattcatcccatatattagagtaatcttaatagagtgtgtgaccttttcctacttcctaagatctctctgaaagagttctatgaaaatgacttaccaaaaatctttattttgctagttacaaaacaatgagaaaaagtggtccaggacacaggtcagagtcatgccaacagtctcaatttttaaagctatactaaactatacaacattcgttattttctttctatacattctgtttctatagattccctgaacaagggtaaatattgattgtgacagggatgggtgacatctgcgcaaattcaaaaccattcaatagaattaatttactctttctgtggatagtaggttgaaccattcagtgttgactcttatatcttattcaatcagctaattatttttgaagagctttgcaactatgaattattgtatggaatgatatttggaaggcaagaaaaatctagttttctcatttacaaatgaaaaaatgtatatagacatctcattgatacatcaacccacaaatttgcggtattaagattcagttttctaaaaatgacaaccttggagaactcaacaaatgttttataaaatttgacagttttagggcttttagccatcttcttttaaaagcccccttatttttaaatccatacttgtgaataacttattaaatgaatgaacagtgggagcaaatgtccattcatccctttataagcacaagatacaaagatggctgcccaaagttctgattcctgagattgatcagggttatttatggagaatccagactattgaggaataatggggagtagtagaaaagaggaggaacatttattgtcctaacaaatcctctagataaagaaagtacatcgttgcagtaataaaagaaaattctttggaagacttcaccgaagatacctgtaagattgtgtttaacaggttctgtattttcctgtgatttttgtcatgaaaaaaaaacttttttgaatgtataacaattgtgagtgtgataactttcagaaaagaaacattaattttacttttgcagaaaaaggtgaacccaaagaacacagtctatgaaataaaagatgatacaggaaatatagaagttatagggaatggaaaatggtacaacatcaactgtgaggaaggagataagcttcgactcttctgctttcaactgaaaacaattgacaagcagccaaagttggtgtgtggtgaacacagtttcattaaggtaggaagaatacagggtcagatttaccaaagaggaaattgactttttctttaggattttaaacatgaacttttcagtgtgttacatagatagttctgtctctggaggagagcattgagatgatgtactcatttctatggggaagatttttaaaaaatggatattgaagaaataatccaaagaatagtgaatatatgccagcttcagcaattaggggttggctgatactgaggaaagtttagctctttacctggactttaagggaagaaatgcctatatatttatgagttatcacagtgtttagcacatcatgagaaatgagtaagtactattttcttaattgggtaaacactgaagagagaaaggtctcagaaatagaaatgtcatgaaaatataccaaagtgtggattgacactattaattctactacatatggaaatatccaacatactcagataaagtcatgttgagtatgaagagcgttctcttcaaggaccatatagttggaaaggggtgactccaaataaggcaatacaatgaagaagatgaatagcctttgaaaagtctcaaggtcatataaggcccctgaggccaatagacaaggatgatgactagacaaaaataaacagtgctttagctccattgctagaatctcatagtatctcttactttctctttcaaggtcaccaaggctgggaaaaagaagaaaatacccactggccatttgaacccaaaagatgaagaaggaagtggctacccacaagtccaattcagtgcttttaacagtggagattttaaaatagagacaccaagcaattggaaataaacaatagctttagcattacattcaaaaatttaacagttttcatatctgatttgtgattaagtattttcatttaaaaatttcttattctgtttttctatgaaaataacacttgaatttaatttctcttgtgtagacataataaaaatttctttttaaaggggtaccatcattcagactaagcagctgtccacagtatggggagagatttttaccaacccatttctaatagaggactgatacccaaatatatatatatatatatatatatatatatatatatatataacaaaaaactagataatcaagaaaacaaataccctaattgaaaaatggggtaaagatctaaccagagaagtctcaaaagaggaaactcagatggctgagaaacacttaaagaaatgttcaacattctgagccatcagggaaacacaaatcaaaactattttgagatttcatcttaaatctgcctgaacagctaagttcagtaaaacaagtgacagctcattgctggtggaatgccaactgatacagtttatttcagtcctcctttaaacactttcaatgaaactcacaatttttgttgtttttatctgagaagtcttttccagactcaaaaaatataagatcatatccttgactctctttagaaactttgtaggttagttcttttccttttagcctattatctggattttccttatttttaagatgtgaagcaggattttctttaatatgaatatggaatttgccctattaaaatgatttttcttgggaaaatatgtttgaataaactcctttctccacttccttgcttcttatttttatccaaaagcagctttctggattctttattgtatctgaccagcagttcctctgttttttaaatgcaaaactacactgaaaaattaccaaaatattatagtttttaatattctagatataaaaatcattatataaaaacgaacttcccctatcttacatccagataaaaactgttaaaaatcatttcccaacattatcaagtacaataaactacaatacatctggcaatagtattttaaattttgatcaacttcacctgtttttacttcctcagttctctgagaactatacccagcctacattatttaaggagtgatttctgtttacttagtttgtctatgtactcttagctattgtcatacactagagcatattcagtctaccagaagccacactctaatccaaatagctctctttctctgctaggggtaatattttttgttaatctgttttctccttactgggcttttgtctggcttaagttccatgtcttgtgtatgctctcacaaacactggatgttcataagtgctaatttcctgttatatatgtcaaactgtttcctatactcatccatccatttttgctcctacactcttctagcttctgggaagcatttaggtacttgtcctcacagacaagcactaggggatccagaaaggttaaacatgtagtgttgtctcttcaaaggaagaggtgtataaactgttttctgcccagaaggctgggaatggatatggacctctgtgttatctgcatgaccagatgacaccagtttagccagactcttattcttatctcaacctctagcactctctccttgaaacccttttgatgagcattgcttaccctgagcctgatgccttagtaaatctacagaacccatctttatggaagatgtcgcttgtacttgaccagagatttatttttttatcattttttatttgaattcaaaacaagattgatttacatgacaatcccagttcccttctccctcccgtcctcccctaccaccccccccaattaaaaccttacctatcacataccctttcttctaatctacacctgactcaacctttctgctccctcatgacttcctcttcttcccttctcattctcacagctccttcctacctcttcccatgctctcaatttgctcaggggatcgtgaccctttccccttctccaggagacaatgtttgtctcttttagggtcctccttgtttactagtttctcaaccagagatttaacatgatcatgtcttaagctttgttgtgcctatgggattaagtcaattatcaccaggatattttctccaaattgtactctgcttaatatgcctgaaataaactacgtgatatccatctgtaagtttgaaacaacacaggccattgagtcttattcaactcaatctccttcttacctctcctggatcaacactactggctatggtgtttgcagagatccctcacaccagcctgctcttctaaaatggtccctgtcatgtgtgaatagggtttgcattatagatgttccatttagggctaagcactgcatagtctcttattctctacaccttgaccattgtggatctttgtactaattaccataagtcattagtagtcactgtagtagtatgtctctttggcagaataacaaaagtctgatctctcctttcatgtataactgtctaaaccgaggttcttgtaccggataatagtgtgggctttatcttgtgatgtgagccttaaacccaagaagaaggtggttggttactccagtgatatttatgccactattgtacatttgggaatacattgctaggcttattatggttgatgctttcagggttcttagctaaataaaactgatgtttacttttctcctctgatagcatgcatacatagcagttccttagcattatgaattctaacaagtgctagattagcatgtgaatcaactacctcttatcagcactgaatgactcaatccttgttatttctcaaatcatctttttatttagcctttcacaataccctacagttcagtctctggagagacttaataatctgttttcctagtcttaacaaaacaaattctgatgcctacatttctgaagattccaaagctgctccaggaaggaaagaactctgaggttttctgtggagcacagccctcatgaggactgggaaacatactctctcaactaacatgctatcttttcctatatttttgcatcatatcctgtattataactaaaagctcaaaatagcatctcatttcatctacccaaaacttcaaaatgactcaaatgcatatatggagtattacttggattttaatattctaattcttcaaaggatggttgatgagcttgaggttatttttgcctctttattgtagctagattttctttcctaccaatctggtcccatcttgctttttcaagttcagtagtcactttcctgtgggtcctgcatatccaatttgtacagaatacagtccaatagtctaggcaagagcagtttcttgcccaaatggctatttctgccatattaaaggcaaactccataacgagtttcttcagtgcccatcttcctctctgatgtaattagtgtgccatgagcaattgtgtctcactgtcatgaaaactttaaaccattttaaatgccacattctgtatgtctttgataggtttgaagaccatctatccatttgaaatatatctttgtatatctagaaaatctaacacaaattttgactattataggtgactacaatctgaattgtaactatacattacattttaaaagagttgtataaccacaatagctaaataagaagagaaatatgctatattcatgttatgtacaaaattgaccttaaatttgtatcaataaatgaaaatccataccaatgcaaagtattcatttctatatcatatcatgttctttgctctcatcatgttgttttggtttcattattatagttgcttttctgaaaatggggcatagctgtgcagtgcaaatatgtgcacatagcagctggttcaccatttgctcaagtctattatgcttattcattctgtatactactcacataacatttgtttaatgcatcatgtttgcttctacttaggcgtttcacaaactgtattttcttcttggaaatcttataacttaagcaaactattctttgctctgagcatccctgcaaagttctactcatcaggcagtactccatttttattgtttatgccatttgtataatttttaattacatccacactatgggttttcaaaagaagtaacctacccaactgttaatttagcaaattcagtgatttaagtggctgttcaatcccctagtatagacagagatgatctcctctttaaaaagggaagcagtgtaggatgatggaatcctggcacagagtgcaataggcagtctgtgatggtctgagtacccagcatttctattacatttatattacacataaacatttaggaaactgtgagagtcttgtacaacactgtggaaatggaatcttggatgttagcattgtagccctctattgagagtctctcaagtggactagatgctaagataaggaaaggaagaaaggagaagccatggtagccctgataagaattgatccacaaacatcgtgatgtatctgaagaatttgtaacaaattcttagtaattttcagtcagtggagcaaagttagaaaattcccacttgagttttatttttatgatgtcatgaaagctgacacatgcatgcatctttctcctcttcttgatgacattgtgttacattaagcatatttttatattttttttagaaatccatgtactatatctcgattatattcaccccctccaccttcccaaattccttctccacactccattccatacccattccactttgcagccatatacatttttaaaaacatccaatcagtatagccctggatggtcttagtacccaaacttttcagggtttggccatccaatagggcatggacaacctaccaggcattacacccttaaagaaaagtaattcttgctattcttgttgctatcaattactaataactcctcagctagggctggaattgcgtgaggaccacccatctccatgatggtgttttgtctgacttgaacttccatagcactgggcatgctgtcacagccactgtgagttcacctgtgcaacttccctgtttagtcaggaaaactctgcaccactatagtgatccacatctcagtctcttacaatctctctgtgccctcttgtatagatccctgagttttgggaggagggtttgagatacagatgtgccatttaaagcagagactttgctttctcttaccaaacacagggacacttaattcttgaaaggaatactatttgttttagcaaaaggatgtttttcattttatttttattatttttaattatatatacatgttaggggtggtatagacacatgaatttaggtgcccagagaccaggaattatgggtcattgtgagccacctgaagtaggtggtagaaagcaaactttggctcaattcctccatgaacccttatgaatttcttgacctctgtggttattagaaatgaaacacatgaatctgaagtttcaatgctgatatctaaataaggtgcaacatgattctaatctttctgtgatcgggtcagaatgattatttccagattcaccaatttatgtacaagtttcatcatttcattttttcttttctttttttttttcgagacagggtttctctgtggctttgaaggatgtcctggaactagctcttgcagaccaggctggtcatttcatttttcttaacaactgaataatactctactacgtaaatgtaccacattttcattatccattcatcagttgactaacacctaggatatttccatttcctggctattgtgaatggactgcagtaatgaaatggatgaaaagtatctttagagtaggacacagaccttagcagatatgcctaagtggtattgatggatatgtggtagcttttctgaggaacctacacactgatttgtagacatttcattagcttgcaatgctgacagcaaagagtgtttccccttctcaacatccattccagcatttgccaacttatttttttttaatttagacttctgactaaatctcaaagaagctttaattagcattttcacaggatgttgaacatgtttaaaagtatttctcaattatttggattttatcatacatttctaattgggttattcgtgttgttgatgttacattttctgtgttctttgtacattctatattctagccatccctaagggtagtgcccatgcccagcagtagatggggaacataaaacaaacaacatttttgtctcatatttttaagtcacgattttttgtttgttttgtcttacagttcttttccacactttatggatttgggtttttttttttttaagggaattcctgtgtgtgtctcagtgtctgtgtttctttcacgttttctttggctttttttattgtttagttattttgtcatagttcaatttgtttattcttaatttattgtgtggcattttattttattatcattctttagatgtctgttcattttctggctagactacaggaagagggaattgatttggatgggtgaggaggaattggagaattgggaagggatataatcagaatatattatatgaaaaaaatctatttcccttttccattattcctaaaatataaaactaaactataataggataaaatggaaattatcacattgaagttggacaagacaaaccagcagataagttaatgcaatgatagtgaaaagcttgtgggaataaccaaccaatatctgatatgaattaaggtccactctacaaattggaagccatacctgacactgcttaggtgaccaagaaccagagattagatagtccagggacctggagtacaaccaaataaaactggtagtaaaataaaataaaattagtggggaaaacttttcaataaaagggaaaaaaagaattcaaagtatcattgttttcagatgatactctatttaagacgccaaagacctcaccagaaatctcctatagctgataaaaacattcagaaaatagaagaataaaaaagtaactcataaaaatcagtagatttctttattatggtggtttctcagaaaattgagaatcaatcttcctcaagacccagcaataccactcttgggcatatatatccaaaggatgctcaatcataccaaggacaattgctcaactatattcatagtagcattattcataatagctagaacctggaaagaacctaaatgcccctcaactgaaaatggataaagaaaatatggtacatctacccaagtgtattactcggtgaaaacaaacaaacaaacaaacaaacaaacaaaaaccccaataacatcatgaaatttgtaggcaaatgaatggaactagaaaaagtcatactgagtgaggtaatgcagagccagaaagacaaacacagtttgtattcacacataagtggatattagatataaagcaaaagataaccaggctaaattcctcagccccaaagaagcttagtaacgaggactttcagaggcatatatggatctccctagaaagaggaaatagatgagatgtcctaggtaaattgggggtgggaaagaaaagggtagggaatggggtgatggaaacatgagggtttagattggcagagttggggacagaacagatggggagaataatgaaagagaaatcttgacagaggggcccattatggggttaggattaaacctggtgccagggaaatacccaggaatccagaaggacaaccctagctaagattcctagcaatagtgaagagggtgcctgaactggccttcctctgtaatcagaatgatgactaccctaattgtcatcacagagccttcatccagtacctgatgaaagcaaatgcagagatccacagccaagcactgtgctgagctccaggagtccagttgaagagagggaggaaggattatgtgagcagggggggtcaagatcatgatgggaaatccacagagaacagctgagtttgcaggagctcacagactctggatcaatagccaaggcgtcagcatcagactggcctagtcctctgcatgtgagtgacagttgtgtagcttggtcttttgtggggcccctagcagtgggagtacaacatgtccctgattatgatctggctctttggaacctattccctctgatacgagggaggggggagggcttggtcttgcctcaacttgaaaagccatgctttgttgtggccttccatggggggctttacccattttgaatggagacagaggaggggtggacaggggaggatagaagggaggggagggaacaggaggagaggaaggaggggaaactgtggttgttatgtaaaataaataaatcagtagatttcctgtataaaattgacaaacatattaagaataccaaacataagaaggaaataatcctattcaaaacaggctaaaaattacaatgaatgcaataaccaaggaagggaaacatttgcacaatgaaagaatttgaagaagatatcagaaaatgaaagttttcccaacctcatggactgtgaaatacagagggatacaagagctgccaaacaccagcatttagaaaatgtacattcatcttttctacacaggcaaataaatggacccctgccagatgatggcattaccattgattattaccatttctactaccacaattcatggcattactctatttttgggttaatgttaaagctctcaaactagcttccactgcttggtgtcatttgttccaagccttggtgtaacaatagtacagacaccatcctgaggtgtgaggccgtaggttaagatatttttattcagataataccagccaagcacaagccagagcatacccagaggcagcaagctagggaggccagagagagagagctcccacatgtctcccgcacctcagaaaccccccatgcgtcatcctgaacaccacctgaccacgccctgacaggtgtggttaagcacacctgtagccagcccttaggaggcatggttacggtgtctccctacaccatccgctatccttaacatgaattgttttaggttctgaagcctcatagcttttccataagttatcaagacttcagtattgccagtgttatgtagatagttcagttcagtgtgacatagaaagcctgtgattgattgtgttttcccataatggatgcctaaggggtcattatcttagactgaaagaagacagcttacttacaatacagacagtagttaatggcaaattactttctaattagcttaatttggagttatgtgtttcttgtaaaattatgctctggaaagctaggccctgggaaccattaataaattaaggagtgctatggaaagaatttaacccaaaagtgattcaacacagatctttccctacctaggaagtgtgcaagcaagtacaaggaacagaggaatctaacaagtttccctgactgcttccatcctgaacagaaaaggaaggtgagatggctgactgagacactttcatctcttagtgatttcacctttattcaaacgagtataagattcccagtgactcacatttaaatctgttgcataagaaggctcagggttgggatttgtgccttcttatatttataagagaaaaaaactgagtaaagaaaagctctatttttgtattttgttttgtttttttcctggaaactacattattaacaggaaacatactgttctagtggaaaagctggggaaatcgaaagctatgaacactgctgggaggagtcctgtttcatcacagctctccccagagagatagcacggggtaagacattaagcattgttcaagttaggaacttagtttaaccagtttccttctcttccccgttattctgtaaataccacattttctcagcatttaatgagattccaacaccctggtgtgtactttttgtgggtttttctacctacaaaagatagacaagcccatttcctgccttgctgaggatctacaatctaaacactgctgagaaatttctggcaaggtaagtccttatgtaagaaatagatagctctgtgaaacccacaggaacaggagggatcagtagtggttcttccagtgggggggtgggggggagcagggatggttccagctgccttaaagacagtgaaaccctgtagctagtttttaatgatccatgcatgaagatggaagacatcattattattctatctctgggatttgaggcaagaaaagatgcattttgattattacatactgtaaaataaactttctaagtatgaatacatagaaaaatataagaaggttttagttatcttggctggagagttagctgaaactgggtggctgtagcctgtgactgagtaaaggacaagctaaggacatgaaaaattaccatgaaataattgagtggaaaatacatctgcacatggagctttgttatctagtaatatcctaataatacacagcatgaaagccagcggacatgtgtagtaaaatttttctaagattcacaaacatagttgttcaaatacattctgttttttaagcatatttagtagtttctttttctctccttcacacaggatagtaaaaataatatttagtcactgggaaaaaattctgtcatcatgaaagtcgttctttttcattggctatatttttctagttttgggtttatgtcataagatgcaggggatataaagtataattaaatagaaatgtatttctattgtttgtttttacaatgatttgaaggctttcttgccctactcatagtattccatgtgcatttggactacatacctcaatagtcagtttgggagttgtacctgtattagacacatcttgctatgtttatcaattatgttgctcaaactttctaaatcattttacagatgttttcaccttattcattcagtaactgatacactgactgtggtttctccttttgatttttttcaaatgaatggatatgtgtgctctcaaagacattgaatgtatactgtgtgtgtatgtgtgtgtgtgtgtgtgtgtgtgtgtgtgtgtgtacacttgtgtcaaaacatattgcatgattttacagagatgtgaaggaacaaaataataacaaatagaatgcacaattattagtaggtaaatccataattaaaactattacctccttctaggatgggaaggcttatcatactttggtatttgataagagtttctaccttcaatactattaaggctccactaatgtagacaaacaagattgtttttagtttctagttaattttgtatttctccactgttaaagaatgtttgattaacaacctaagagtacatatcttaaataacatttcgcagaagttgttattggactgcttaggtcctttgctgtggtctggtaatcagcaggtttttgttctgcttctgttacggccatttcactgtgggatgtctccatcttacaccaacaatctgtatatcgtctttcaccagttccccgaccatgttatgcacttcctttttcacatttttaaaaattaggtctttattttttctaccaagtctttatgtgtgcctaataaagtttttagtttgcattaagaaagaactgtatttgattcctttctcactttttagttctttgagagattaacacactgtattttgctcatattcaccccccacaactcctttcagatacatactcaccttcttacccatccaactctctatcttcctttatcattaaaactcaccaagtacagtttgtgatcaaccaaccatggcccatgcctttaataagaatgattctccacctcccagcaactatcaagtgccaaaaactccttagctggttatgggactttgtgtccactccctctcactgcttgcttggatttagtctggcttaaacttattatgttgccacaaaagctctgagttcacatgatcatacatgcgccattgtgtttggcaaacaccatgtccctgtagtcattcaccacctctggctcttcaattatttcttcctcgtcttcttcaaggattcccacaaagaaggggtaagattggagattacttttctgtgctggtagcatgcatagcaccttccagccccatagaactagcaagtgggaatgtagcttcaaggtcagtagcagctgatgagtctccatgttctgtgatcacatgtatgtggtgtctctatcaagatctggaaggaaaccaagagcagtggcaatagcttggggtgtgtatgtgtgtgtgtgtgtgtgtgtgtgtgtgtgtgtgtgtgtgtgtgtgtgtttggggagatgttaagggacctcagcaatcaacaactccaaagtaacctattcctgacactaggatttttgtttgttagtaattgatttctagaaggatcgttgttactcattatatggaacatacttcatttaagcactttcttatacgaatatgtgtttattttataaagtatatacggtagtagtttccataagacattttgaaagctctttagaattagctattctaattacatattccctccactattctgcccccacactctccagctgcacttaaccatagtgctctattctcacttgaaagcatcactcttaaatcatagttctccttcattgttccctaagagtctcatgccaatacagtattaaatgcagttcaatgttttaaagttccatattcctcaaatttttcaacacgttatagaaatccaaagtctctttaaaatcctaaatgtacttttagactccagtaaaataaaaagtgaggcacatactttctgattccaaaagggaagtatctggacattggaacagtaagatataggcaaaaccaaaatccagaggtataaatccaaattcttggttgaatgaattcagaggctcccatatcacaaaaaaaaaatctcaaaattacaacataacagggactccctattttccttcacagaatagcacagaaggacaaggatatttcaggactttggtctgagtacaagtttagaacttcccatttttgaggtttccatattgtcattaaataggcccactacctattatgtttatccgtaaataatgcagagacactgtggattcattaacttggccacataagaaagcagagcttcactgtagtccagagagaagcagctaatgtcaaattcctttctattacttgaaggctaaatgtgcagcattctgcttgaacaatcttctggcttaggaactattgaaaaataagaaaatgcattattaagtgattaaacccaaagtacctgcatcagagatattcctcaacccaggaaagacattcagttctttgtggtaatagacactgaattctcctcctgcagcatccaaactgagtggaaaagaagtgtctggttggctcacactttcccatttagaaattacttttattcaaaggaatgtgattcttaccacgggtaaatctgttgaacaggaaggcttaaggttgtaacatcctcatatgaagacatggaaggaaaacaactgagcccagtggacctttgtttcattgtaacgaagtgcatacaacatggaaacctttcaatctcactagccaggagccacaccaaaagctaagaacaatggaaggaggcctgtcttttgcagtcttcctctccccaggcagagcaccgtgcaagacactcagagctacacaacttgaagtaaagggaaatgacgctcaccagtgtgatacttccggcttttaaactacttgcacttcttgcaacttcagggattgcaacatcactgtccagaatctgagagatttattcatttatcttcttattcaatagaaactatctctgtttcttgccttgcagataaactagcatctggacactgctgtggaaatttccaagaaggtgagtcctgccccggctatgtagagttaagagctctgtgggaactcattagggaacagaggaaattagaaaggctttcttcgaggagagtggagggttcagggctggtgtcagctgctctcagagcagtgaacccacagcagctagtttatgatgcttcactagggaagatggcagacatatttattccaccctttctggggtctaaccaacaaaaacacattttggttatgaaaaataataaagtagctttctaaatgtaagtatgaggaaatgggaaatgagaaggctttagttatcttggctggagagagagaaggaacttgttgggtttgatgattggctggggaaaaggttaaggtagtgaaattaaatgattgctatgaaatagtatttagtgaaaatatgtaatgacatggagcagcactctcgtattctgatattgcacaggttgagaaacaatggacatgcatagttccaagttccacagattgccacagttattcaagtccatctttttttgatcatccacaaataaacttatcattgtctttttatccacagtatctcaaccatagtgaggtaggtactgttatattgaaagtatttttttttttttttttagttttagcttgtttggaattgttttttattttctggttgaaaatgctgggtgctgatgggagagttaattagaaatatatctctattgcctacttttagaatattttaaaggcttcccatatatactttagaatttttttgtttgtctgacatgattgaaatgctgtaatgctttactattagaaatagagacattgtaagaattttaaggatctctccctggccagttctttaagcctgtgtttctctcaagtagggattgccacttttttggtcaggggtggggagtcaagacagggtttctctagattgctttggagcttgtcttggaaattgctttgttgaccaggctggcctcgaacacacagagatcttcctgcctctgcctcctgagtgctgggattgaaggcatgtgcctctaatgtccggctctttagagtttttaatgtgtacttgaacaaagtattttagaagttgactgcagatgtatttttatgtaaggttatctctcttgctgtatcatttatgtttctcaaatattccaaactttttgaagaattttataccttgttaatttactatttgaaaaacatacttctgtatctatcaaaatattgtgtgtgttttctgaaattcacagatgagtatcctctcttacatacacataaagaggatatgtgtacatctgtgtgcatttggaacaaaacacattctatattgctacttatggctctatgaagagacacaaaatactaagaaataccatacacaattactggtatataaatccatcatttaaaatattatctctttacaagtgtgtgttctggttgctttttatcatcttgatccaaaataaaattatctagagatacctgagttgagaaaatgctttcttcaaaattgcctgtaggaaaatgtgtagggcatattcttgattactgattgatgtgagtgtgtagcccactgggggcagtgccattcctgtgcaggtgttcctgaatgctgaacaagccttgaggatcgagcaagtaatcagtattcctcacggcttctgctttggttcctgcctccaagttccagcctcaaattcctgctctgacttccgtcaataacgtcaataaagggttgtgatgtggaatataaaatgacatgaacccctttcttctcaaattggtttttgagtaattgtgttttgtcagagcaatagaacctataactaagacagaaaatggaactgggtttctaggatgttattgtgatataccttactctgtgttttaggaaggattaagaaatttgtaactttgagatataaaagctattgagtgtttaaaggttgatgaactattgtgggaacttacagaggacagtgcagatggtacaggtctggcttgaaaatttcagagggaaagcagagaatcccctaaagaatctactgagaccactcaatattttgaatttcaaatctgtggttctggtcagctgggactcaagaattggctgtgatcaagaagggttcttctcaccatcagtacatagaatttgaatttgtggtccagaaggggacaaggctgtgccttgtgctgacaaccaaacttgtaatgtgaaagactcacccagttgccactgttttggaggcatgaaggggtcatggggaatagctgaggtttgtcactgtgaaaggccatgaaactccattggtgaagatacagcccaggtgcatttggaactccagaatttctgagatgtcagtaccatgggatgtccgccaaggacagtagcaggtgtggagagaggtagcctaagcataggagaatcactgtatgtgtttggatggaagaggaggagaaatggagctgccaagttcccttagagcccagagaatctttctacactcttgaattttgattttgctgtggtttgaatataattatgacctggttttcctcttttagaataagaaggtatttaacttttttattttgcaatagttcagagttgagatatgttgaattttaaagattttggaactttagagagactttggatattttagagtggacgctttgaaatttgggggatactttaggcattttaaagagacttaacatttaaagtgtttagctttttagcagtgaggctgaacatatattgataatccagaatctagtgggcataaattgaagcaggtaatctgaagcagtctgaggaagcatcccgaggatcactcttttggtctgagcattcatagaggtaaaaaactctgtagtggctgcctgcttttcttctctgatcctacaattttcatcccctgatagctgactctgagtttttactattaagaacaactagaattcatggtacaacttgtaggtagaaaactgtgtctatgaacaaataagaatcactaagtcaaggctgaaaagataaaaacaagaagctactgacacaattccacccaataaattctggggtgcttctctggaatgtatgtagatgtttgggaaattgacagtgacatgagcacaaaggacccaaagatcacaagcccaggagagcgtgattttaaaatgaggtggtgtttgaggggaagcctagtggacaaggttcagtggctcagcatgggccgtgttacttcagcaattgttcatccaggtacactgtagtaagatgcagtccattagcatatagagcacttaagaatgagacaaaccagaaacccacatgcagatacccaggaacaggctccagcaccaaataaggatggaaagggacacaagatttcaataatcatagactagactatgaacactgcaacaattactgactccatcacttttcatctgctgcagctgccactggcctaagtcaccttcagtgactaatggggaaggatttcctaaacttgtttactaagacagaagctctgcatccatcttgcactgcagcacagcttatattgaactctgtttttctcccacctgccattatggacaatatggtcaagtggggtcattcattcacacaagaatgcccatattttagccaggcattggtggtacatgcttttaatctcagaactcgggaggtagaggcaggcggatctctgtgagtttgaggccagcctggtctccagagtgagtgccaagataggctgcaaaagctacacagagaaaccctgtctcgaaaaaccaaaaaaaaaaaaaagaaaaaagaaaaaaaagaaaaaaagaagaaaagaaaagaaaaaagaatgcagaatgcccatattttggaattgtctgtatatatgtgtaatattatgtccattttcttcttttaggattgtccatagttttatatataatgagtgaatacaagaaaattgttctcttaaaaggatttgaggtcatggatgactaccattttagaacaatcaagtccttattaagaaaagaactaaatctaactaaaaaattgcaagatgaatatgacagaattcaggtggctgacataatggaggacacattcccacaagatgctggactggacaaactgataaaagtctgtgaaggcattaaagaacttgaagaccttgctaaaaagcttaaaaaagagaaggcaaaaggtaacaagggagcacacaggagactcatcccttctctgctctctccccaccccaaattttctagcttcctgcagtaaacagagatgataggtctctttcccattgtatgatgtagaaactataggagtggaagctttcagatgtcaacaaaatgattttgagaaatcccttcttataaagaaatgtgatatatttctggtagacatcttttgctttggatgtaaataaaataaatatcagttgtcaagagagattagaatacccaacatgatagaaaaactaaaaaaggataaagtaaactttttaaaaaatcatttaaagcttttaaatagagcaaactaacacatgcttaaaaatattgccctttcattaattccttttttggtaagaaatgtgatctaatatttaagtagaagtctgtactttagagatgtgaagaaggttgtctttataaagacactggttttaaaaaatattgggcataatgttacacaactctgacctgagaatctagcacaaggaggcttattcaaggagacctgcagattaagaataccctgaattatgtagaaagatatattcccaatatagaagtaaaactccaatgctattatttggttacatcaaatatcaaataaaaattgtttctctttttctatgactgggaatgatactgcttagaagttgacttattgctattatcataaaattatcatgttttttaaatcagtctgggggataagatgaatgtgtcaggtctgtactgacaaaaacagaacttcccaagatggagaagctgaacacacagacacgagtacagaagaaatagttcttgaaagtgtggcaggatatttgatcacattgtacacccagagattacattatttacctggaaaaaaatctttctaggtttggtcgggttcagccctagctcacacacttaagccaacagatttctgcttgagtattgtaaagaggattaaataatgtcaaccctaggtcaagaggcagagcaagcaaccagctgacaggaagtgaacatatgattactaaggaaaaacagagagcaagaggaagccaggaggatggtgagagagaaggacaggaagtagaagtgagggacactgggtttgagagattttgctttgagacagtataggaaaagggggtttatgggacaccagtgaaataggaaggtcagctgggtgtttactatggctctgtgagctactaggctttcactcaaacatctggctcctgagtctacattggtaaaattgaaggattgagttttgttaaaatcaacatgaaatcactgactttctgtaaaatcgctaatgaaaatggaataaattactaatttcagtttttacaaagaaaatgaaataattctgaatgaggttcagccatcttaaccatttccctggatttattgtgttttcttcatccctgtagttaaaaagcaaaagaaagaaaaaactaagactgcagtgaaaaaagcaaagcaagatgaacccagtagttcccaatctcttcccactgatgatgacgccaacaataataaagactctttaaaggtaaagtgcccaatctcccaccaaaaagtttctactcgagttccttaccttcttaattccttagaaagatgtcgtactctatctgtttagtccaaggtcctagtgagaacagggttataagtcagcaagttcattcactttgtgccagatttaccgtgtgatctaattagtacagtgtaaccccccatgatgcaaacacacaatccctatgtggctttttgaagaccatttactgaaatatcagtagcttgtgacctggatttacaaacagaaaacctaatatgatgcttgtaattctacaccaaatacttttgaacaccacagggataaatagggtgagatagatgtgatttttctactcctctacaagacaatcacatatctctgaattagggtttatattgctttgaagagatgccatgactataccatctcttatcaaaagacaaatttaattgagacttccttgtattcagagttttggtcaattattgtcatggagagaagcatggcagcattcaggcagacattgtgctagagaggtagtccacagttctacatcttgatctccaagcagcaggaagatagagacacactggtcctggcttaagcatctgaaacctcagagacacacttcctccaacaaagtacacctactccaacaaggacccacatcctaatgctgacaatccctggtgaccaagcattgttggtcacttctgtgagtctatgcaggacattattattcaaacatccacactatgcaatccagattttaagaatgaggttacacaaatataattagaatccagtaataaaagaaatattcttgtggtcatgtaaatattcttctttgcttagtactaatgacatttttaggcctggggataaaactgtatagaaaagtacaactttgcatgtataaagccagcgattcaatttcccacacatgggaaagtcaataaagaaaaataaacatggttctttcagaaaaagagaaaaatacccacaaaatctgaaggtggcaataaaaagaagctcacccaggagacaactcaacttccagaaccttcacaaggcagcacacaaacagatcaaggatgtctccagactcctcaaaagcctccaccaacaccatccagcagttccacaaacaaggtaccactttcctattcccaggacttgccccttcccaagcatatcactggactctccacaatcttggaaatatatctcaatggttaccaattacaaagattatccttatattattaaatagttcgttaagttatctaaccaagtatcacagcctccatgggactgaaaaggtaagtatttatgaaatgatttctattgttaacaacaaactttctgcttagggttcagaagaaagtactggttagactaacaagggtaaacagaaaactgtatcaatccctattgcccagtttcttctcagtcctttacccttcgctagtgatctaacttcagatgttattgtcaccattctgttttctattctgcaggtgttttgacacatgctatttccccgcttggaagtctttatccctgtccactcactaaccaagtactgtataactgtaatggtcacttttgctgagaatcaccttcagatccttccaggcatagactaaacctttccagccattcctcatcaaagggaacaacatcctgtccccatttccatgccttcttaatataattacaatgaccataaccttgaaataactcctcatctactctcataccctagtatacacatataccctccactaatcaggcaagtatgttgaaatcccgactggaatttacacaaatcttattttactacacagtgcaattgtgttgaatactagatgtgcctagcatttagtctttataaatggttgagtcccattatttagcatggtaattccttagccacatctaattaagtgtttttataaatgatgacaacaatataattcaaaatgtacacaatcttggaaaatagtttacagttaatgataattctaacttgaatggcattagcttcatagcagtttttgcattttaggagacttttaccttgagcaatcaaaaacataaaaagataacaggaataaaagggccaattcacttacacaaatgtgtttgcatactaacttcacttttaaaggaaaatttataatctttaaaattttatagttctaagattataaaagtgtgatgaagaccataactagatctgttgcctgaagcacaaggatttctcacatgtgtaaaagttttgtttaactggaattatggcaattttaaaaacctaaacaaaggtttaaatgaatccaaatgggcttcaggcatgctagtccagccctctaccaactgagctgcatccccttccaccaaaatccacttttttatagtacctgtcacacaatttcagtcacatcacctgaaagtgtttgtggggggatgggctccctgtatgcaaaataaggattgaatagttgatggattagaaagtttacatgaagaaaagtacagaaatagccaattttactataaacttcatttcccagaaaataactaagagttgaaccaaaccaaataatatttgaccagttttgtaagatattttcagctagtatcctgtctcagaccaatgaaaattcagcacctagcttgttagagaagttgtaatgtctatgtctattaggaagggtggaagctaggtgttagaaatacttcagtatgttctaaaatgcttccttcatcccaggagaaagctgacagggtaaaattaatcttttcagaagagacagtaaaaagatattcttggcattcttttaaaaaaccattaaactgtattaaacaatatctcaatcctaatttgctttagaaacagaaaaacacaggcatcaaaaatcatagtactataaccacagaagttccccagaaaaaacaccagcttcaagaattgtcagcaaatgacatctcctcagctgccagtgaactgcagtctcctcagggactttcatcaacagcttctagaagcatcaagactccttgtgcacctccattaacaggcttcacttcaaaaaagtctcatggttctccaggaccacctagcctgacttttccaatatctccagcatcaaactccagcatgcaccagaactttcctgtgcctctaacactgtccagtgctgtccaagctcctagtgtatcttcagcaacaccatccagtagtgtgggggtccctcacatgccttcagaaacagtgtccagctctctcaatgctcctcaaatgtctccagtatcagtgcccagcagtacccagaatctttgcccacctaccgcagtagccttcaatagcatgcaggctcctcccagttctcaaatattagcacccagaagtgtccaaacccctagagttccttctgcaacattgaaaagaaaagcccaggacataacgacatctccagcaacagcctccatcaatgtgcaggttccccacacactccctgaagcagtgtccagaaatgcctgcaccactcaggtgcctctaagagcaccatcaagcgacattcagactcttaactgggctacggtaagagcacccaggaataccaaggtcccaggtcccttagacactgtacctatttatttcctggctttgccatctccagcaacaacagctagtagtctccagacttctcaggtacttccaccaccaacatccaagagtcttgcagctcctcaggtgcctctaccaatagagacaagcagagtccagaccactcaaatgcatccaggagcagcagccaactttacccatcctcttcatgctcctccagttacaggatctaagagtgtgggcaccactcaagtgcctccaggagtagtagcacccagaagtgggcaggcccttccttgtcctaaagaaaaatcctctaggaatgtccaggctcctcagatgccttcagcaacaacatccagcagtctcctgtctccacgggtgtgtccaacaccagcatccagcagtcttcggtcttctctggtgcctcaagcaacgacaaagagcagtccatacagggtaatgactttctgttctcaaaatataaggacagagattagcccaaagttgaaaggcttcttagttaatctatgtgcacacaaaattttatataaataatcattcatttttattgtgtatagttactgatccttccctacattcaacttgaaaatattttgtatgttctactctattaagacaatgtctgactcagtgatcacctgacgtgtaaggaatatagtgagacattttcttatttaattttacaccttgcagttgttgtcaaggtgttgttttcatattttgaatcgctgctccggttatactggaaatatgcctcctggtgttatcacacaaatatcaagaatctgagttaaaccctaccactcacagggtgaagtctatctgttttgaagtcagatttcagagactgctctcagttatagctgcctttctgtgctggtacccaggttagccacgactgccaccatgctttcctctttcagttctacagagttcttacattccaaagtactcttctgatactcagaaatgtaataggatgcttaggagtcaggtgatcaaattaaaatgacttcatgaattttatctgttcccggattctcctccgcgcctgctattatgcaaaaagaatagctgctggcctgaaccctttctgattaacaatatttaagggaaatcttcctggggatgcctacctaaccctttaccagaaagctctgactttttagtcaaggttttgtaattgaaatcttcaaaatgatcctagataagagacttgaatagagcattggaggctgtaggttcattccccacaactataagtataatccctttatctaccagataaaattagtattaaatggaatcagtaggtaaatatccatttcttcctttatctagttcacattatggcaatcgttgtttagatgtcctcaactctatacacattggatttgtgtattgtgatctgcctgaattatgtttatcatgtgtgtgttttatgcagacactagggagagggaacataccaaaggagccttctaaggaagaaggacatcagcaaggacccaaagaagtgatggtgttgaaagtaacagaaccatttacttatgatttgattaaagacctatggatgttccatgccacagtggctactgagactgaattcttcagagtgaaggtttttgacctaaccctaaaggacaagttcattccaaaaaagatcatttcaatatccgattattttggtgccaatggatttctggagatacacaaagctgcctgtgtgtctgatgtgaatgttaaccaaacgatggttatctcaaatgcactgaagcaaagagccaatgcaactcctaaaatcaaggatcttttctcacaaacaaaaggaacatatgtgaatggagaatttatggtatttacggtaagccattgcattatttgtaaaatttcttctgcaatctgactttaggttttaacttgctcaggttacttaacacagcaagtaattgcccttcttttcagaaagagttgcctaaggtttactcactgtgggtattgggataatttctaatcattcttctcctcaaggtagcaccatgaaaattgtttagaaagggattcatcaacaagctttagcattttcacagctatgacaatccatctatagccatcttattcccagacactgttcagtttataacacactttcctttcagagtttattactttgaaagcttccttacccatattcttggcaattcggttgtaaatacagagtcagccatagcctagatacagttacagatgatgacaataaaaaaaattcaaatggactattttgcactagaatgaagccctgtccaacatgctaggattatttctttaatgtgctctcattatcatattcttttctttttatcaagatcttttgaaggaatgactaacattttaaataatgagagaacgtggagattaacagattggtttaatatcacaatttataatgaggcacaaagaaattgaagatattaaaggaaatctgtgactttctggtgtttgtttaagtaacaatgcaccaattcattagtatgcttgttcaatgtatgatttcataatacactgtgtatgaatcggccacggctttttactttcatcatgctgtttttgactatgttgctacattggttacacaattaataagtaaactaagtggaacacaaactaaaataccaggactaaatgctgtaaatttaacttttgaaatattaagaagtaatagattgaattgatatcagatttgagcaaacgtgatccatttaaaaaggtgtgtgtctatttgtttctcattctgtttcttttttatatttgctagtttcctcattctgttttattcttgctggtttgtcttctctattcacctgtcagttttcttgagagagagagagagagagagagagagagagagagagagagagagagagagagaggaggtatggagttggaagggtggaaggagaggattatctaggaggaggtaggggaggataaactatgatcagaacatgttctttgaaagtaatgttattttaaataaaaattaaaataaatgtaaaaataagacttataatagtatttctcagactcacagtgaggcctttcttgttagacctcctgagatacctaagaaacctgcaattgtaattaaaaggatcttgttccttatttttttttttatttttgatctctgattgtgagccttaggaaaccttagctattctgatatattaccactagtatttagtaagacattcattgtcctaaagacacccagtagatgaagtcttcaggtaggtaaaacttaacagtggcttctaagggctgcactcatggctcagtcattaaaggctaggctcacaaaacctccagagtgatttccaaaaaaaaaccgatgtgctcacctaaacatcttaatctcctttgttcctataattctattttttcagttatttctatatattgtcggggagggttgagaggaaacacaaaggccatgaaactattgtggagtcagaagagaaaatccaagaacaagttctgtccttctaccatgtgtcctggtaatggacccaggcaatcagacttgccaacaccattactcttaccccctgagccatctcactggcccttgtgcctgtgattctaaacctgagtgtcatacttgccttgtcaggaacagctttatgctgacactctttattctcatcaatgtgacaagctttgacacatttccaaaaggataaaagtaaacttgtttttcagaaaactgagaggaataacttcatttactatggtatagaagatgataccgggaaaatggaagtggtcgtctatggacgactgaccagtatcaagtgtgagccaggcaataaacttcgacttgtctgctttgaattgtcctcaagtgaagacacatggcagctgaagtctgtaaggcacagttacatgcaggtatgtgctccgggaaatacgattcttcctaagaatcatatttttttaatattctagtaaaatttgactttggcattgcatagaaaatccagcaactgtgggcaaattaatctttgtatatttagtaaactttattccattatattttaagtaaggatttttaaatcataataaagaaaataaattcagaaagactcaaaaagttgttatctgtttagctaaaatataaaaaccatctcatttatcaaaataaagagaaaatttggtaggaatcaggttaagatgtttctttcaaattccgactctctgatttttcaaatttaccaaagactaaaacacaaagaacttggggtcttcatctataacattcaaatacattctgttgcagaggatcatgaacagaaattgttaagttcccaaggcttccatgagcgaatcggaccacaatatgctaaaatccacaatccttgtcatactcatacactgtgtggggttcattctacacttttatttaaaggccactattacagtggaaacagaagaaataaaaggggtcacccggatatttacagtatcatcattctcagaccatcaggcaaagttccaaaccttccccatggcagctgcaccagcaaagccttttcaccctccacccaacctgcagttcagtgagactctgcaactcagtctttagcccaggtgcctcagcagtttcctctccactatagctttgtgctcaagcctgtaggagtgactagttattttcatagtctaaactagggaagaaagctgactgtaaggacagagagttattatagagataggccagagtgagaaaggggatgtgactcatgctgactagttcgtaggaatgtagacagaagtgtggaaccatctacatttcaactgatctaacctcaatgttttcttcttcaaggtcatcaatgtcaaaaagaaactccatcaacactgatgcagttatgaaaagctccctagaaccatactcctgaaaacctggatgccaaggatactgtttatggaaatatgatccaagtccagaaaaataaatgtatatatgacctgttgaaatactgtacctatgaaagcaagctaatttttttttcagttttttatacaggctttctctgtttagtccttgttgtcctggaactcactttgtagatcaggctggcttccaactcagatcaaactgcttctgcatgcctcatgcttggataaaaggtctaggccaccacatcccggacctcacctaattctaggaaatggtgctttttattataatttatacatttctgtattaatctaaatttaatgtttgtatctataacttttataattggtgatctataagttttacatattaaacttaaaaagacacattttctgttaaagcattgattcgctgggaatatctttcaaccatttgagaattgctgtaaaataaaaagttagtggcctccagataaatatgtagaatacatgtttcaagtgtgatgtttaaggccaaatcatgttcaagaacaaatagactgtgtcctgcccagaaaagacaagctttaataagactcaggaaacatttgaattcagccttgagtgcaatttacaaaactgctatgctgaggacaagacttcagacccgttttgctgaataatgcaagtgtgttatagaatttgattatttgagcaaagaattcccccaaagtgggatgttaagagtggggaataatatttacaacaataaggaatctcaactccgatttcaacaccagaaaacttgagagcaaatgagcaagccctatgataaaggaattaagaaattagtaaggactcccagagaggcctttctggagtattgttaactctctccctgctctgaaaacacacctgaccaaagcaactgaaggaggaaacgggtttattcttgctcgtgctttagtggtagaggagagtgtaatggacagtcacattgtgattacagcaggatgcagaatgaggtgagttccagaggtgagtgccccttttgtgagtctctctctctgtctctctctttttattgagttcaggagctgacctattcaacaatactgcccacacttaaaagaagtgtttgcacattctaaccctgtctagaaagtccctcatgcacaagctcaagggattctcatgagtgattctagatactgtctgtttcacaatcaatattaacaatcacacaggacaatgatctgacagggagttaagggcaaagaaaaggtgggaatagaataaataaatgcaggaggaggaaagagctaagaatgagtgtatctctcatcttggaaatccatgtcttctttcccattctagtgatcctggaaatatgggcttacttgggtgtgtttacaccttggtcacttcccatcaatagatcaatgtcactagaaaagcatttgtgaaccagcataggactgtttcagaacccgagaacaaggctgtcagtttggaggtcttggcagtctatggagcctctggtagtggtcagtatttattccccagtacactaatggactttgggagcccactctacatagaaggatactctctcagccaagacacaataggggggggcagtctaaggccctgctccaaatgatatgacagactttgtagatccaccatggaaggcctcaccctccctggggagtagaaagaggttaggataggggggtggtagggggtaagggaggagggaagggagagggaactgggattgacatgtaaaagaagtttgttttgaatttaaaatttggagcatggcctagacctccccccgcccttgtatctggactgagagaacatccctctatgcggagtgggctcccaaagtccattcttgtactgtagataaatactgatccactaccagaggccccatagattaaccagacctccaaactgaccgcctcattcagggggtctggaacagccatatgctagtttcccagctatcagtctagggtcaatgagcaaccccttgttcaggttagctgtttctgtgggtttctccagcctggtcttgaccactttgctcatcactttgcatgcaactggattccagagttcatctcacggttaagttgtgggtttctgcttctgtttccatcagctgctgtatcaaggctctaggatggcatataaagtagtcatcaatctcattatcagagaatggcatttaaggtagcctctcaactattgcttagattgttagttggggtcaaacttatagatctctggacattttcctagtgccagaattccctttaaacctttaatggctccctctactatggtatctcttttcttgctctcctcttttcttcccctgactaaatcttcctgttctctcatgtcctcctctctcctcctcttttccccttctctttcttctagctctctctcccctcccccatgctcccaattagctcaggagatctatagtgtcttgacataacacaaaacagactcagacagaaggaaattacatgctttctgtaatagtctgatacagagaattatatcttatatagacataacttttcaatttatataatccacaaatgctgtacaacaaagatgagagtaacattgttaaatatacctatataaagtagattggaactatcctctatctacgttgtatgacaatagttctggagaggtttaaacaaatatctactcacccaaagctaaagttcgggtacaagtaaagctgatagtaacatcatgtaaagcatgtaatatcatgggatgttgctgacaggaggaggaatgactcaaaaacagctatatcaccacttcattcaaaaggagtaacagctcacaacaactagaaacctagagcacccttgacatcctatagacagtacagtgcttaggcgagtgtccttttcacctagttagtttgtctgagcctcttccaggtagcttggctggtctctattttgtctagacatattatcttatctgagagtatctagcaacactccttacattctttgggatggaggaccccattatatctggtttcagggacttcctgaagcctctaagttgtttacttcttccaggatgggagttcccacccattctttgtagctttggatcctattctggcactcgctctggagaccaggctcgcctggaactcacagataaccgcctgcctctgcttcctgagtgctaggattaaaggcatgtgccaccaatgcccggctcacccattcttaaatgtcctgctactctgcatgcttttgataaataccctgtgtgttaataagctttcctctaagaaaagtgaaagagtgagatcttggaggaaactgcagtctccctggtgtttacagagggactcaactcctctcctgcctgaatttgtaccacttacagtatggagaagaccagaagcctctctgtcagtttctttttgagttctggacaaaagaaaatgtaggatacctgacacagtgatggcctcactgtaagcatagtaaccaactgctttctgattggacttgagacctgttacacaagagtaaattcatacctagcatatacacttcatcaaaacttctcacctggagagagcaggccacagggagaaacctctgttgtgtgatatttaattacattgtgtaaagatatgtcactcagattcataaagtaaaatagctgaacagctaatagctaggcaggatttttagggcacagaggactatgggaagaggaagggcaaagtcacatggagatgtggagaaaccatgatatgtagatgaggtaacaagccctaagccacatggcagcaaggaaatcaatagaaatgggttataagatctagctaaaaaaagaatcctatgctattgttgacagagatttcataattaataaaaagtatctgtgtagggatttggaagttggctggtaggacaaaaaaaaaaaacaaaacaaaaaaaaaacaaaacaaaaaaaacaaaaaaaaacaaaaaactcactacaaactacagaacttattatcagttaccctaaaataatcaagtttatatttgtagtttaatgctactcacagccttggtcagagtagcttctttttgttgtgaataattttactctattaaagtgaaaaccttccttttttaatgggagaaaaagagagaaatgtggaatgcccctttacattgtgtgactatatgtcactgtgatcggtttcataaagaagctactggccaatagctggacaggataaggttaggcaggagagccaaacaaaggacagtgggtagaataagggttgagtcggaagtcatgagccaaatgcagaagaaacaacatggaaagttcacaaatgaggttaaaaaaaaaaaggccttggggcagcacataaattaataaaaatggattaatgtaagctgtagaacctagttagtaatactcctaaactgaacagagttgttatttgggagcagcttccagggcagaaaaagtccacctagaggagttgctattaattctagtactgagatgcttacctaacatcagcaccagccactgcaccaatttgggagctatttggaatttgaatccagaactccaattagagcttgagatctggggctagttggagtcttaactttaacacctagagtgattccaaggctaaattctaagcattgttttcctggcctaatctgtcagaccagaataacaaggagaaaaaagctgaacatccacacagcaaagaagggacagagatccactagagatgtttagttctcaatgcaaaaacaaaaacaatcaagataatctatctccttcctaagtaagccaccaaacttgaaggggattcccaaacaggtggggctcccttccagatcctacattaggcagacaccacacccaaatgactgttttcatagagagatcatttattaagctgggaagaaaagttaaagtggctgctttctgactcaggcggaaaaacagcagcaaatgatgtgtcattttaagagtgggaaaggggaggtctgtgttagaacggtctgggaggcagtggtaaaggggatggggactgggaaaagaagaaggggacaagggtagggggtaaggggtttttatttgtctttgagggacaaagaactgcctctggataaaggggatacacatgcccctcctcttccttatacagggtcacatccacaccccaagtccactggcagaataagatgccactacagtagtatgcaaattcatggaagcttaacaactctctactaatgtaaactgggcccaacagaaatcaagaaggaaattaaacaccttttagaaaagaattaaaattaaaatgcaacataaccaaatctatgagaaacagtgagtggtgttctaaaagccaagttcatagcactaagtatcaacgtcaaaaaaaaaaaactataaaagtattatattagtaatttgaaggttctagaaatacaaacaagaataaaaggtactctaaagcggtagccagacagaagttatcaaactcagggctgaactcaagaaaattgaagcaataaaaacattacagagaatcaattaaagttacccctttgagaaaagtcaacaagactgacaaacctttagcaaaattaacctatgaagacatgcaagaaaaacaactgagtacagcagacctttgtttttcatgctaagttaagtgtagcagttaggagaaaatcaaatcttgtagctggggaaatcgaaagctaagaacaatgggaggagtcttcacttttgcaaccctcctctcccaggaataacagagggcaagacattcaaggttgagcaacttgaaatgaagtgaaatgactctgacccctgtcattcttcccaccattaaaaatccttcatgttcttggcagttgagggattgcaacatccctgttcaaactgagagtttaatcttcttattcaaatagaacttgccctgcttcttgccttgcagacaaactaggatctgggcactgctgaagaaatttccaagaaggtgagtcctgccccctgctatagagagttcagagctctgtggaacccattaggggacagggaaaatcacaactgcttccttcaggagattggagggaacagtgctggtgccagctgctttccggggagtaaacccacaacacctattttctagtgcttcactaggaagacggcagacattgctactgcagtcttactgggccttgaaccacgaaaaatgcattttgatcatggctgataataaaataactttctaagtgtaagtatgaagaaatggaaaatgaaaagaaggctttttagttatcttggctggagagagagaaggaacctgttggctttggtgatttactgggtaatgattaggatagtgattttaaaaaattactgtgaaatagtatttagtgaaaatgtatcagggcctggagctattccgatattgactaacatgagaaacaatgagcatgatagttcaaagttccacagattcccacagttattcaagtacatgtttttttgatcatcctcagatgtatttatcattatctattttatcagcagtatctcaaccataatgagttagtttctgccatcttgaaagttattgttttcttttattttagtgtgtaattttttaaaaaattttaaggtggaaaatgtaaggggctgatggagagttatttagaaatatatttctattacctacttttagaatgtttaaaggggtctcacttaccctctagagtccttaatgtatacttgaacagagtattttagaagttgacatgagacatatatgtgtgtaaggttatctctaggtgtatcacatatgtttctaaaacattctaaaatttccaaggctttatatcttgttaatttagtatttgaaaagtattctgctgcatctgtcaaattactgtgcatcttctcaagttcacacatcagtttgctctttcaatttacatgagagggtttgtgtgcatctgcacattgggaataaaacatatgttatgttgtgacattatgatcctatgaagagacataaaatactaagaaataccatacacaatcactgatatagaaattcaagttaaaatattatttctttctaggttatgttctggaatttttgtcaatttgacacaaaataaaattatattgcaagagatgtctgagttgagaaaatgcttcattcaaaattgtgtagggcatattctgttttaaattaatttgtatttaaattaaaaacaattttattttgtttttgttttaacatagccattgcacttctttttttcttttgtatttcaattagaaacaagcttcatttacatgtcaatcccagttccctcaccctccccttctccccaaaccctcaccaacccccatgccatcccctttctgctcaaagtctatcatatcatttggagcaggatgtagaccctcccctgtgtgtctaggctgagagagtacccctttatgtggagagggctcccaaagtccattcatatactaggaataaatactgatccactaccagaggccccatagattaaccagaccttcaaactgacaggcttgttcaggggttctggaacagtcctatgttggtttcccagctatcagtctggggtctatgagcaaccccttgttcaggtcagctgtttctgtgggtttctccagcctgatcttgacacctttgcccatcactcctccctctctgcaactgggttccagggttcatctcagtgcttagctgtgggtatctgcttctgcttccatcagctactggatcaaggctctcaggtggtgtgtaaggtcaccaatctcattatgggagaagggcttttaaggtagcctttccactattgcttagattgttagttgaggtcaaccttgtagatctttgaacaattccttagtgccagatttctctttaaacctataatggctctctctattatagtatctcttttcttgctctcctctattcttccactgacaatcttcctgctctctcttgtcctcttctccccttctctttcttttaactcctctcccccctctatgctctcaattagcttaggggattttgtccttttccccatctccgggggaccatgtatgtctctcttagagtcctcgttgtttcctagcttctctgatggtgtggattgtagggtactacttctttgttataggtctaaaatctatatatgagtgagtgcacaccatttttgtctttcggttactggcttacctcactcaggatggtttcttctagtttcacccatttgtgtttgaatttcaagattccattgttttgttttaccgatgagtagtactctattgtgtaaatggaccacattttctccatccattcttcagttgtggggcatctagattgcttccaggttctggttattacaaataatgctaccatgaacatggttgaacagatgtccttgttgtatgaatgtgcatctttgggtacatgcctaagagtggaatttctggatcttgtggtagactgattcccattttcctgaggaaccaccatactgatttccaaagtggttatagaagtttgcacactcaccatcaggggaggagtgttcccttctctccacatcctctccagcataaaccatatctgacagagggctgatttccaaaatatacaaataactcaagaagctagtcaccaaaacaccaactaatccaactaaaatgtcgggtacagaactaaatagagaattctcactagaggaatctaaaatggttgaaagacacataagaaagtgctcaacatccttagtcatcaaaacaactctgcgataccatcttactcctatcagaatgactaaaataaaaaacaatcttattttacatgccaatcccagttccatctcctacctatcctcccattctccccaccatctccccatcccatagcccatccactagtcagggagggtgaggcctcccataggggattgttacgtctgtcacatcttttggggcaggacctaggccctctgtctctatatctagactcagcaaagtatccctccatagggaataggctccaaatgcccattcatgcactagggaaaaatactggttccacagccagaagccccatagatggccaaaggcccccaactgacacccaaggtcagggaccaggttagttcttatgcaggttccccagctgtcagtctggagtctgtgagctcccacttgctcagacttgattaatggttgtgtgagtatgtagcatcatggtcttgattaatggttgacgtgagtatgtagcccacaggggctgtgttactcctgtgaagttgttcctaaatgctgagcaagctgtgaggatcaagcaagtaatcagagttcctcatggcttctgtttcagttcctgcctccaaatcccagccttgagttccttttctgatttccttcaataaaggactgtgatgtggattgtaaaatgacatgaacccttatcggtccaagttggttttagtcacagtgttttaccccagttatagaacctataactaagacagatattggaactgggtttatgagatattattgtgacacacatgactgttttaggaaagattgtgaaagaattttgtaactttgggatataaaagcaattgtatgtttacagattgatgaaatattgtgggaacttacaagataatgcagggggcaatgcagatggtgcaggtttggcttggaaattttagagggaagattgagagtcctctaaagaatcaattgacacaactcaatgttttgaattacaaatctgtgattctggtcagctgatactgaagaactggatgtgattaagaaaggaccagcatagggttcatagggaattgctgtgtcttgttactgtgaaagtccatgaaaggacattggtgaagtatcagattagctgctatggggaccccagtatttttgagatgtcagcaccatgggatgtccaccaaggatggcagcaggtgtggagagtggtagacaaacataggagaatcactgtgtgtgctaggatggaggagcagaagaaatggagctgccaaggccttttgagccctgagaatattttcacactgctgtattttgagtttgctatgatttaaatataagtatggcctggttttcccctcttggaataagaaggtaggtagattaatttttattttgtaagagttcacagttgagacactttgaatttttaaaggctgcattttagagaggcttctgtgctttacagagacactgggtatttaagagagactttggatatttttgaaatgcattggatattttagcaaggctttgaaatttggaagaggtgtcatgtgtttcaaagacactgaacatttaaagtgtttagctgtttagaagtgaggctggacacacattggtatccagaatttgatgggcagggattagcattgatgcatgtatgctatattgtgacatactggaaattctgttgaggttggataattagtccaaattcaaaagcaatgactcttcaataatacaatgaaatttctcacataaatggaacccataaaactacacataattgttattatatatcatgttttacttcaaatatttgtgttttcacaagaaccaacctaaataaaaactttatatttttattttctttgggatctgtagaacagtattgcataaaaactaaaagctgctctgaagaagagagttttattgttgaggatcagttttcatctcctccttgaatttgtaaatgatctaattttaaatgtctgatggcatactaagtatgtatttttcttaatactcattatctacttgtcatatgttcttgtgtcaatcttctattcatccttgggtttctttgagcatagatggtgttcagttactctcaatacatagagaaacaattgacagcactagaaattaatatccaaataaactgaggttcatagaagcataattccaaaactgaaacactgggctctgtcaatcctctgaagattgtcaaggaagtacatacaatgtgaatgagctacaacacagaacattcattacattggaggatttaggcaatttccagaaagtctattttttttatttctatttttctaatttttgtcattagtttcttacaaatttctctgatgatgagaagtctagtcatagggttgcagtctcagtaatgatgccagctatgggtttcacctcatacaggccttaatcaaatagcaaattggatggctaatccccaaatcttcatggcactattgcaccagtgaacaagtcttgccatactggttgttactgtatcccaaggataaacaacaaaggaaagttaatgattgttttgttccttcagtattgggcatagtactttctagaactggaaaatctggccagtagggatgaggcttccatgtaaatatcaacttgatttctccatgttctctgactcaaggagggtgtcttcagcagtagagtctcaaccacaccaagaacattaactggagattgtttgttggagttctatgagaactgactggccaagaattttaagagagcaaattaatttatcagaaggaataatcctaataaattaggaaagtattaaaagatcttgggaggatttaagctttgtttgtaggtataaaattgtgtctatgaccaaataagaatcattaagtcaagcctgaaaagataaaattaagaaactactgacacaattccaatgaattaaattctggggtgctgctctgaaaagtatatagatgtttgggaaattgacagagatgtgaacacaaagaacccaaagatcacaatccaagcacagaagagatgggatgttaaaaagatggggtgtttgaggggaagcctagtagacaaggttcagtggctcctcatgggccgtgttgcttcagtcatagttcattcaggtacactgtagtaagatgcagtccatttgcatatagatcactttagaatgagacaatccagaaacccacaggcagatatccaggaacaggctccggcacaaataaggaaggaaaagggacccaggatttcaataatcatggactcgactgtgaacactgcaaccactacttattctaacacttttcttccaccacagccgccactggcctaagtcacctagagtgactaatggggaagaatttcctaaacttgtttactaaacacaagttccacatccattttgaacagtggcacagcttgtattaaacttttttttctctcaccttatcaattattgtcatttactcacatagaaatagccctgctttgaaattgtctatatgtgtgtgtaatcccatgtccatttttcatctttcaggattgtccataattttagagaaaatgagtgaatacaagacaattgttcttttaaaaggaatgaagttcatagatgataaccattttaggacaatcaagtccttactaagaaaaaaactaaatctaacgaaagagatgcaagaggattatgacagatttcaaatagctgacctgatggaagacaaattcccaaatgatgctggactggacacactgattgaagtttgtcaaagcattgaagaacttaaaggccttgcgaaaaacctgaaaacagagaaggcaaaaggtaacaggggagcaccctgcacacttatcccttctcaaccctccccaagctgtctattttccttcagtgatcagagctgataggtctcttccccactgtgtgccttacaaactatagggcttgaagcattttagatgtcaacaaactgacaatttcgagaaatcctttcttacagagaaaattgatatatttctggattgacaacttttgctttggaggtaaataaaataaatagcagttgttgggggatataagaatatccaacatgatggaaaaaatagaaaactataaactaaaaaatgaaaaatcatttaaagtatttgaatagagttaaatttaatgctagattaagactcttacacattaattaatattttctgctaagatgcgtggtctaaaacttaagtagaaacctgcattttagagatgtgaagacatttcccctttataaagtcacaaggtttaaaaaaatatttgatatactggtacaccactctgacctgggaatgtagcataagaaggttcagtcaaggagaactgccaattgaaaataccctgatttacatagaaagctatatccctaatatagaagtcaaaatccaatgttactactttgttacatcaaccatcaaatcataattctttctctctttctatgacatggaactatcctccttagagggtagatattgctaacaccataaaagtttcttgttttcaaagtcagtctgtgggataagagggcagggatagggtcgtaatgataaaaacagaagttaccaatatagagaaactaggttcactacacctgggatttgcaaagtatctctcaaggcgatgcctgtatctgacttggtaccactggagaacttctgagcaggtggagtctctgcagcagaagagaggaaatacacagacctgagtacagatgaaatagttcttgaaagtgtggcaggatatttgatcacactgtgcacccattgatcacattatttacctgaaaaaaaaaaaaaaactctttctatatttggtgtggttcaggcctagcacacaaatttaagccaatagatttctgcttgcatattgtaaacagtattaaataaagtcaaccctaggccaagaggcagagcaaacaaccagctaacaggacgtgaacataggattattaagaaaaaaacattgagcataagaggaatccaggaggatggtgaaagagaaggacaggaagtagaagtgagggacaatggctttggaagattttgcattgagacagtataggaaaagggggtttatgggacaccagtgaaataggaaggtcagctgggtgtttactatggctctgtgagctactaggctttcactccaacatctggctcctgagtctacattggtaaaatcgaaggattgaggttttgttaatatcaacacgaaatcattgtctttctgtaaacttgctaatgaaaatggaaggaattaccaatttcattttttttaaaaaagaaagaaaatgaaataattctgaatgaggttcagccatcttaaccatttccctggatttattgtgttttcttcatccctgtagttaaaagtcaaaagaaagaaaaaaataaaactgcaggaaagcaagatgaacccagtagttccaaatctcttcctactggtgttgaatccaacaaaaataaagcctcttcaaaggtaaggtggccagtctcccaccaaaaagtttctacttgagttccttaccttcttaattccttagaaagatgtcaaactctgtgtttattccaatgtcctagtgagaacagggctctaagtgagcaaattcatagtgacctgtcactcattttgtgtcagatttatcatgtgctctaacttgtgcagtctaactccccaatgatgcaaacatacaatcactacgtggtttttttcaagaccatttactggaatagacttgttttgtgacctggattttacaaacagaaaaaccaatacaatgtttgtaattctacaccaaatacttttggccactacagggatatatagggcgagatagatgcaatttttccactcctctgctagacaatcatatatctccaagttaggatttatattgcctcgaagagatatcatgattacaccatctcttatcaaaagacaaatttaattagcacttccttgtattcagaggtttagtcaattattgtcatggagggaagcatggcagcatgcaggcagacattgtgatagaggggtagcccacagttctacatcctgatctccaagcagcaggaagatagagacacactggtcctggcttaagcatctgaaacctcagagacacacttcctccaacaaagtacacctactccaacaaggacccacatcctaatgctgacaatccctggtgaccaagcattgttggtcacttctgtgactctatgcaggacattattattcaaacatccacactatgcaatccaacttttaagaatgaggctgcagaaatataattagaatccggtaataaaagaaatattcttgtggtcatgtaaatattcttctttgcttagtactaatgacatttttaggcctggggataaaactgtatagaaaagtacaactttgcatgtataaagccagcgattcaatttcccacatgggaaaatcaataaagaaaaataaacatggttctttcagaaaaagagaaaaacacccacaaaaactgaaggtggcaataaaaagaagctcacccaggagacaactcaacttccagaaccttcacaaggcagcacacaaacagatcaaggatgtctccagactcctcaaaagcctccaccaacaccatccagcagttccacaaacaaggtaccactttcctattcccaggacttgccccttcccaagcatatcattggattgaccataaccttggaaaaatatctcaatggttaccaactacaaagattttcctcatattattaaatagctccttaagttatctaaccaagtatcacagcctccataggactgaaaatgtaaatttttatgaaatgatttctagtgttgacaatgaactttctgcttagggttcagaagaaagtactgggtagacaaacaagggtaaacagaaaaccgtatcaatccctattgcccagtttcttctcagtcctttttcctttgctagtgatctaacttcagatgttattgtcaccattctgttttctattctgcaggtgttttgacacatgctatttccccgcttggaagtctttatccctgtccactcactaaccaagtactgtataactgtaatggtcacttttgctgagagtcaccttcagatccctccaggcatagactaaactctcccagccatatctcatcaaagggaacaacatcctgtccccatttccatgccttcttaatgtaattacaatgaccataaccttggaataactcctcatctactctcattttaacataccctattatacacatataccatccactaattaggcatatattttgagatcctgactgcaatttacacaaatcttattttactacatggtccaaatgtgttgaacaaaatcaatgtgaccaacattcaatcttttctaatagtagagtcctgttatttagcattggaactccttaggcacatctaattaaatgtgtttatttatgataacagtaatataattcaaaatgtacatattcttggaaaatagtctacagttagtaataattgtaacttgaatggcatcagcttcatagcaatttttgcattttagaaggcttaccttggacgatcaaaaacataaaaagatcacagaaaaaagggccaattcaattatacaaatgtatttgcatactaatttaccttcacttttaaaggaaaatttataatctttaaaattttatagttctaagattataaaagtgtgatgaagaccataactagatctgttgcctgaagcacaaggatttctcacgtgtgtaaaagttttgtttaactggaattatggtaattttaaaaacctaaacaaaggtttaaatgaatcccgatgggcttcaggcatgctagtccagccctttgtcaactgagctacatccccttccaccaaaatccatctatgtgctccattttttttatggtacctgtcatataatttcagtcacatcacctgaaagtgtgtggggggaggtgggctccctgtatgcacaataaggattgaatatttgatggattagaaagtttacatgaagaaaagtaaaaaaaagccaaatttactataaacttcatttctcaaaaaaataactctaagagttgaagcaaaccaaataatatttgaccagttttgtaagatattttcagctagcattccttctcagaccaatgaaaattcagcacctagcttgttagagaagttgtaatgtctatgtctattaggaagggaggaagctaggtgttagaaatacttaagtatgttctaaaatgcttccttcaacccaggagaaagctggcagggtaaaattactcttttcagaagagtgaaaagatatacttggccttattttcaaaaaccattaagtggtattaaaaatatctcaatcttaatttagtttagaaacagaaaaacacaggcatcaaaatcatagtactatagccacagaagtttcccagaaaaaaacaccagcttcaagaattgtcagcaaataacatgctgtgaactgcatcagtgaactgcagtctcctcagggactttcagcaacagcttctagaagcctggtgaccaaatattcaaatctacgagtctaaggggggggggcattctttttcaaacatccacactatacaatctgtctgttaacaatgaagtttacacaatgtcacaaaaatatttagagtccagtaataaaacaaatgttcatatggccttgaaaatactatgctttacttaatacttaagacattactaagaactggggataaaattgtataaaaaagcacaatttaccatgtacaaaccctggggttcaatttcaaaaatcaataaagagaaacattgttctttcagagaaagcaaaaaacacccataaaaactgaaggtggcaagaaaaggaagctcacccaggagccgactcagcctctagcaccttcaggaagcaacacacaaaaagatgacaggtgcctccagactcctctaaagcctccaccaacaccatccattcattcctcaaataaggtaccactttcctattgccagtgtttgccccttccctaaggttgtctggacacaccacaaatgtggaaaaatgtctcactggtcccctactacaaagattttcctcatattattaaatggcttgttaagttatcaaatcttgtattatgacctccctggtatggaaaagataagtttttatgaaatgatttctaatgttgtcaaccaactttttgcttagggttgagaagaaagtacagggtagacagacaaggacaatagaagaccttatcgatccctattgcttagttccttcttagcccttttccctttgctggtgactcaacttcagtggttattttcagctttctgtgcccttctcagcaggtgttttgaaacatgctgttttcctcttggaagtatttatccctgcctattcactgagcaaatactttatatctgtaatggtcacttttgctgagagtcaccttcagacccctcctagggatagactaaactcccccagacatttctcatcagagggatcatcttcctgttcccatgttgatcttttcttaatataactacagcaatcatgaccttgaagaacttgccatttaatctcccagtcaatgtcctcatcaaatctgccgagccagttatattgaaaatgcacttcctgatgttagaacacatccaccaagaattagagttaaaccctgccccccacagggtgaaggctgtatgctgccaagtcagatttcagagagtgctaccagttattgctgcctccctgagctggtagccaggtggccatgactgccaccatgctttctgcttcagttctccagtgttgcttccatttcaaagtgctctcctaacggtcagaatggagccagatactgaggaggcaggggatcaaagtaaaatgactccatgaccttttcctggtggcaggattctcctccattcgtgctattattcaaatagaagagctgctagccagaaccctttctgattaacaatatttcaggggatcttcctgaggcggcctacctattccttttataagaaagatctgacttttagtcaaggttttgtaatcgaaatcttaaaaatttttccagatagaagacttgattagagcattggaggctttgggttcattccctacaactataagtataatacctttatctaccaggcatagttagtaataactgttatcactaggtagtgattaaggtaaatgtccatttctctctttatctatgttgtagtatgacaagaattgtttagatgttctccactctactcagtggatttttgcaatgtgatctgcctgaattatgtttgtcctgtgtgtgttttatgcagaaactagggaggagaaacataccaaaggagccttctaaggaacaaggacatcagcatggacccaaagaagtgatggttttgaaagtaacagaaccatttacttatgatttgattgacaacaaaatgatgttccatgccaccgtggctactgagactgaattcttcagagtgaaggtttttaacacagccctaaaggacaagttttttccaaaaaatatcattgcaatatctgattattttggcaccaatggatttctggagatacacagcactacctctgtgtctgatgtgaatgttaaccaaatgatggttatctcaaatgcactgaagcaaagagccagtgcaacccctaaaatcaaggatcttttctcactaccaaaagggacatatatgaacggagagtttgtggtaattaaggtgagccattgcattaattataaaatttctttgcaatctgagattttaagttttaacttgtcactggaatttcctcaacttacttaacaacttacttaacacatgtcagtaacacttgtctaagatttccttactttggagattgggatattctcttatcattcttttcctcaagaaagtaatctctcaataacctttatcgtttttcctggatgtgtcaatccacctatagccatcctattcccagacactcttcagtttataccatgcttgctattaagattttgtttctttgggatcttccttatccatatttactcagttgtgaatgaagaatcaaccataacttagatacagtttgagaagatgagaatataaaaaaacaagtgattattctgccctaaaatgaaaccatgtccaacaagccaggattatatattgaatgtgttctcattatcacattctttatgttttatcaagatattttgaaggagtgactaaggtttgaaaaaatgagagaaagaggagtttaacagactagtttaatttcacaatttataacaagccacagcaatgctatggcgttctggtgtttctttacatgcgatacatcacttcatttgtgttcttgttcaatgtgtgatttcataattaattgtgtaagaatctgccatggctttttacttttatgtatgctgtttttgacttgctggatcatctgcttaaacaattaataagtaaactaagtgggacacaaactaaaataccagaactaatgctgtagatttaactgttgagggtgaggaaggagcagagtgaatccatgtgtgcactgagcaaaagtgatccatttaaaaaggaggtctctctctctctctctctctctctctctctctctctctctctctctctgtgtgtgtgtgtgtgtgtgtgtgtgtgtgtgtgtgtgtgtgtgtgtgtgtggctggatgtctgtttgtctatctggctggctgtgtttgtctgtctgcctattggtttctcatgctatatcatttttatgtctgctagtttgcacattttgtgttattctagctggattgtcttctttattcacctgttggttctcttaagacagagagagaaagaaggtgtggatttggaaaggtagggaggagaggattatctagggagaggaaaaatataatcagaacattttctttgaaaataacattattttcaataaaaattgaataaagtaaataaaaaaggacttataataatgtttctcagattcacaatgagcaccaagtgccttttatctcaggcctcatatttatacctaaagaaccagcaatggtaactgaatgggttttgacttatatttgttttttttttatttttggccccttacttgggagcctgagaaaacttcagcaattctgatatattaaaactagtacttagtatgatactcattttcctaaagatacccagcagatgaagtcctcaggtaggtaaaacttaacagtggcttccaagggctgcactcatggctcagacattaaaagctaggctcacaaaacctccagaccgatttccaagaaaagatgtgctcacctgaacatcttaaactcctttgttcctataattctattttttcagttatttctatatattgttggggagggttgagaggaaacaaaggccatgaaactattgtggagtcagaagagaaaatccacaaacaagttctgtccttctaccatgtgttctggtaatggagcccaggcaatcagacttgccaacaaacaccattacccttacccactgagccatctcactggcccttgtgcctgtgattctaaaactaggtgccatacttgccttctcagggacaggtttatgctgacactctttattgttcatcaatgtgacaagctttaacacattctgaaaagatgaaagttaatttgtttttcagaaaactgagaggaataacttcatttactatggtatagaagatgataccgggaaaatggaagtggtggtctatggacgactgaccagtgtcaggtgtgagccaggcaataaacttcgacttgtctgctttgaattgtcctcaagtgaagacacatggcagctgaagtctgtaaggcacagttacatgcaggtgtgtgctctgggaaatatgattcttcttaagaatcatattttttaatactctagtaaaacttgactgttggcattgtgtagaaaatctaacaagtggaggaaaattaagttttgcacatttaataaataatcttccttccattgtattttaagtaaggatttttgaatcataataaagaaaatgaattcagaaatactcaaaagttgataaatgtttagcaaataataaaaactatctcattgggcagaactcagaataattaagatgtgtgcttcaaattctgactctctgatttttcaaattgactaaagggtaaaacatgggtacctcagctctttcctctccactgtaactttgtgctcaagcctgtaggagtgactagttagtttcatagtctaaacaagggaagaaagctgactgcaaggatagagaggcattatagagatagaccagagtgagaaagcggatgtgactcatgttgactagtccgtaggaatgtcaagagaagtgtggaaccatctacatttcaactgatctaacctcaacgtattcttctttaaggtcatcaatgtcagaaggaaagtctgtcaacactgatgcagttatgaaaagctccctagaaccatactcctgaaaacctggatgcgaaggataatgttagcagatgtaagattcaagtccaaaatgtaaatgtacatattacctttgaaatacatacctattaaagccagctctttgtttgtttgtttgactctctctttcttcgtttttcaagacagggtttcactgtttagtctttaatatcctgaaaatcactttgtaaaccaggcaggcctcaaactcagagatctgcctgcttctgtgtcccttttgctgagattcaaggcctgaagccaccacagcccagccctctcttaattctaggaaactgtgctttattatattctttatatatgtttgtgttaatctaaatttcatgtttctatatataacctttataattggtaatctataagtttcatattaaagttaaaaaatactcacattttctataaagcagtgattccctgggaatatctttcaaccatttaagtgttgctgtaaaataaaagccattggcctccagaaaaatctgtggaatacaggattcaagtgtattgtttaaggacaaatcatattcaaaaacaaacagactgtgtcctgccgagaaaaaaataaaaacaaaacattaataagacacaggagaagtttgaattcagccttgagtgtagtttccaaaactaatgtgctgaggacaggacaagatttgacccattttgctgagtaaatgtgtgtggtatgcagtttaattatttgagcaaagaatctcccaaagtgggatgctaagagtggggaataatatttgcaacagtaaggaatctcaactccaattctagtatgaaatatgtttttggaaaccttgatagcttagagcaagccctatgactaaggaattaagaaattagtcaggattcccagagaggactttctggagtattgtaaactctctccctgctctgcaaacacacctgaccaaagcaactgaaggaagaatgggtttaattttgctcatgatttaatggcagaagagagtaagatggacagtcacattgtgattacagcaggatgcagaaagaggtgatttccagagctgagtgctctgtgtgtgcctctctctctccttttattcaattcgaaatctaaatctattcgacaacaccacccacatttaagatgagtgtttcaaattcctaactctgtctagaaagcacctcatgtatatgggcaagggattctcaggagtgattctagatcctgtctggttcacaatcaatgtgaacagtcacaagaggcaatgatctgacatggtggtaagagcaaagaaacagtgctaataggagaaataatgtcagaaagagagaagagaaaagatgagtgcaactctcatcttagaaatccatgttttatttcccattctaattgatcctggaaatttgggcttaatggggtgtgtttagttcatggtcacttcccatcaatagatcaactagatccattggaaaatcatttgtggaagggaattatgtttgtttctcttttattatctgttttgttttagctttgttcttccagaacatgaagatgagacagactagcctggggaacagattcgacactcgaggctccacttttcttgtccaatagtcacaaatgcactatccagccagagaccattttctgtatctcctgtgtacacacagcattcttctcacaatataaatgaaaagtatttggccacatggacacacacacatatatcaggttgcaaatatatatatatatatatatatatatatatatatatatatcaaacaattaaaattattactgcccttagaaatactttcataagacacttatattcaaatatatcacagaacactattggtaccaagatagatggtctgatctaggctagactagtttggctgacattacaacaagataaactccatcctcacagggaacttttatgatgaatatactatttaaccacttattcctatgtataattgtgtgtatataatcaaaataaaatactgtgtggaaagggatatgaacaggaatgaaatgcctacctaatataagcctatttattgaaatgaagattcacctgtgtcacaccccttcagtgacctcactactccttctcttgaactccatgaaaggggctccaaacaaaaaccggggcccttgagctcctttcctcatgtggctcactgttgttcttcatacatatttttgtctgatctgaacttacactaccatgaatatagtttcccggcttctttaaaatgtgtgaaccccaaatattagaatgaaaatagaagattttgaaaacaccaggcttggattctgatcaccaccatatcctgtaaaaaagatacaggaaaaaacttcaccaaatgccaaagattaggtcttggattgccaagctttcaacactcagtattacatttatttacttatataacactttatctgtaatgttcttacacaataataaacagactcagacaaaagaaaattatgtattctccataagagtaagaaacagaattgtatcttatacagaactaatgtttcaaattatataatctataaatgttgtgcaacaaagatgaaaataacgatgtcaaatctacctacatatagtatgctggaattatcctatatctatgttgtaagacaatatttctcgagaggtgtaaacaaatatctactaaccccaagccaaattttagatataactgaagtatgatttggtaaaccaatgagatttatacttattgtggttcttgtagtaatattgacaagatgttacttacaggagcagaaatgactcaaagatagctttttcaccaaaaggagtaacatctcacaatagctagaaacttagaggatccttgacagcctaagggcagagtaatgttttggagagtgttctttttatttggttcagttgctctgaacctcttccaggtagctgggctggtctctaatttgtccaggcatattagcttgtctgagagtgtctagcaacactccataaagtctgtacatttctggggatgaaatacccaattctatgtggtttcagggactttctgaagcctctaaattgtttactccttgaccttaatgatcttccttgaaagatgggagtttccacccattcttaaatatcctgctactctgcatgtttttgttaaaactctgtgtgttaacaagctttcctttgatgtgaaagactgagatcttggaggaaactgcagtctccctgatgtttacataaggactcaactcctctcctgcctgaacttatgcctctcagagtgtagagaagaccagaagcaaagttgtcagtttctttttgagtttgggacaaaagaaaaaaatagaatacttggcataatgatgacaccattattacagtggtaacaaactgctttctgattggatttgaggccttcaacagaagagaaaaattcatacctaatactacacacctcatcaaactccccaataccaggaatttttgcctcttgttgaatcttaggccaaagggattccatagatctccctcgaatattgctggctattgtttgtttgtgtgtgtgtctgtgcggttgtctgtgtgtgtgtgtgtgtgtgtgtgtgtgtgtgtgtgtgtgtgtgagagagagagagagagagagagagagagagagagagagagagagagagcatgttgatgatgttgagcagtagggagatagggaaaatctggtaggagatgggaaagggaagagactatggaaaattttactgtatgaatttttatttataaaaaccaataagaaccaaaaaggaaaaggaaaaaggaaccagcagaagtggcagcattacagcaaaggtgcatgcagcagagcagctagacatgcaggcagtcagcatggcaaatgaacatgacgacactgcaggcttccagaaggggcagctgaacaatataaggacagtggtctcaacaggtcacagcagcatggcagaagtagaggattaagtaccaaaggcatagagaattagaggtgaaaacctgtaggtaatggccataggaagacttcctgaggcctgtggagcatttggagccaaggttctcaggtaccctagacctagaatcgttaacactggctgctgtccaagactgaagactcccaatacccaagctctccatgaagctataatcctaggccaagtgaatgctgagttcctaagccttcaggaattgtaaggtttggaaagcagagggtgtgaatggcttaggtctgactacacaagagcaatagagccttgatgcccaagacttatgagcaaactgcatgcaggactagaaggcaggattgtaactgctgttgcctgcctgcctgctatattctctctgtcaaaatcattgggcacaagagctgccccaaaccagcatttgaaaactttcttgcatgcctatgtgcacatgggaccctaacctgctgaatgatatcaccccaagaacatattcctgtttgcacatctgctggagtgttctcactgacatcctctgcctggcaccatttgtactgtgtctccaattacatgagacaccagagagtccccactgtccttgacagaaaacaaataggttaatggtcatttcaggttcctgatgttactaacacctaagagcttagccacagttgtcaaggcttcaatggtgttattacatagacccactatacctgctgggttcagccataaataacaaatagtgcagaaatgctaaggactcattaacttaatcactaaaggaaagcagtttagctcttgtccagatggcagctaattccttcccatttacccatcattacattttcaaatgtgtgacgaaatccttcttgggttattttcgagcttggggaactattaatgaatgagagaatgatttagtaagtgcttaaaccaaaatagttgtactctgtatcttctgctaagcaaatgtgtttagttcttggtgggaatatcctcctgctcaattctcctcctgccgccaccactctgagtggagaggagggagaagcatctgggtggttccctccttccctttcagatgtgcctttattcagaggaatgtgtttcttagtgacccatggataagcctgttggacctgaaggcttaaggttggaacatccaactatgaagacatgtaagaaaccaactgagtacaacagacctttgtttttcatgctaagtaaggttacgcagttaagagaaaatcgaatgtttttcatgatctgtggtttttttaattatcttcttgttgataacttataaactatctcttttattttaatctttctatctaagaagttggcaaagagtgccactaccagtcacacatatagagaagttccagttttgtgtgtttctgaatgggctttttagcacaattctgaattacaacttggtcttagatcattaagtattaaaaagtaaggtctaagtttctggtttctaaaagtattttgacttaatagatcaactataaagaagcactaaatactctttatttgctattacacataaaccacagtaagtgcctttcagtggtaaaaggcagcatcctttgacttagggaattctaattaaaatgacatcatcaaggcaagctacttcctgatgtatagccattgcctgtaacagaccagtgaatacaaactgaaacactggtgagtcttctcattactgagacagtaacagaattttcccagtgtttaaacatactcatatgtccagttatataaatttaagtataaaaccattcaataggtttgaggtgacacacccatctttgtggaaagtagaactttaataattaagtccaatcctattttgagaaagggagagcagtgaaagtatttctacaattggaattgttatttttttttttaaagatcatatccactttactacaagtcagttttacttaaatcaggactgtccaacaaaaacattgttagccattcatgaatcttgctagctggggaaatcgaaagctaagagcaatgggaggagtcttcacttttgcaaccctcctctcccaagaataacagagggcaagacattcaaggttgcgcaacttcaaatgaagtgaaatgactgaccaatgtcatttttcccatctttaaaaacgcttcatgttcttggcagttgagggattgcaacatccctgtccaaactgagagtttcatctccttactcgaataaaacttgccctgcttcttgccttgcagacaaactaggatctggacactgctgaagaaatttccaagaaggtgagtcctgccccctgccatgtagttgagagttcccagggccccattagggaacagggaaatcagaactgtttccttcagaggagattggaaggagcagggctggtgccagctgctcaacttctaggttctgaagcttcagcagacatctttattccactcttcttttggcctgaggcaacaaaaatgaattttggttaaggctgataataaaataactttctaagtgtaagtatgaggaaatggaaaatgagaggaaggctttagttatcttttttttttttttttacattttttaattttattttggaagtactcttatttacatatcaatcccccattccctcaccctcccaacctcccatgcttcccactgaccctccacccgactccccacctactccccaggaatagtgaggtcctccaagggggaccatcaaagtccctcacatcatttgggtgtagggcccaggccctccttctcatatctgggctacaatagtaaccctccataaggaatgggctcccaaagtccatttgtgctctagggataaacactggctgcactctggagaccctagtcgtaaacctggggaaccagcattggacagaatcaagctctctgaatgtgggtgccagctaggaggccaagactttagttatcttgactggagattaagaaggaactagttggctgtgtgaaatgactggttaaacaataggatagtgacatcaaagaattactgtgaaatagtctttagtgaaaatacatcaggacttggaactgcaacctagtgttccaatattgagcagcatgaaaaacagtagacatgcatagttcaaagttccaaagattgctacagttattcaagtccatctttttctgatcatccacaaacatagttatcattatctttttatcagtagtatctcaatcacagtgagttagtttctgtcatattgaaaattatttggtttctttacctttagattgttcgaatttgttttttttttttaattttctgaaggaaaatgtaaggggctgaggaagagttaattagaaatgtatctctattgcctacttttaggatattttaaagctgtcccatgtactctttgagttcttaatgtgtactgaacagagtaatttagaatatatatgcatgtaatgttatctttcttggtgtatcatttatgtttctcaaacattctaatttgttttgcagatgtttatactgtgttaatttagtatttgagaaatatactgatgtatctatcaaaatattgtgggtttactcaagttcatagatgagttttctctttcaaatacacatgaaagggatttatgtgcatctccacatttgaaacaaaacatattttatgttcttacttattatggtcctatgaagagacacaaaatactaaggaataccatacactattataggtatacaaattttcgtttaaactattttctctttctaagggtaagttctggttggtttttgtaactgacacaagataaaattatctgaaaagagataatgagatgagaaaaggcttccttcaaaatagcctgtaggaaagtgtgtagggcatattcttgattaatgattgatgtgagtatgtagcccattgggggcagtgccattcctgtgccggtgttcctgaaatgctgagcaagccatgaggatgaagcaagtaatcagggttccttgtggcttctgtttcagttcttgcctccaggttacatccttgagttcctgctctgactcccttcaatactggactgtgatgtggagtgtaaaatgacatgaacccttgtcggcccaagttggttttagtcatggggttttatcacagctatagaacctatacctaagtgagaaattgatgcttgctttttgggatattattgtgacacacctcactgtgtttaggaaggattatgaaagaagtttgcaactttgggatgtaaaagcaattgtatgtttagagattgatgaactcttgtgggaacttacaagataaagcagagggcagtgcagatggtgcaggtctggcttggaaattttagagggaagattgagagtcccctaaataaactattgagacgactcaatgttttgaattacaaatctgtgattctggtcagctagaaccgaagaacaggatgtgattaagaaggccccagcattatggaggtataatctgggaaatgtcttctcactgtcagcacacagaagttgaggctttccagaaaggagcaagactgtaccttgtgctgaaaaccaaactttgcaatgtgaaaagttggcactgttttggaggcataaagggttcatagggaattgctgtgtcttgtcactgtaaaggccatgaaaggacattggtgaagtatcaacaagctgctatggggaccccagcatttttgagatgtcagcaccatgggatgtccaccaaggatggcagcaggtgtggagagaggtagataagaataggagaatcactgtgtgtgcttggatggagagcagaagaaatggagctgccaaagccctttgagcccagagaatattttcatactgctgcattttgagtttgctatgatttaaacataattatggcctgcttttcccctcttggaataagaaggtaggtagattaatttttattttgtaagagttcacagttgagacactttgaatttttaaaggctgcattttagagaggcttctgtgctttacagagacactggatatttttgacactttggatatttttgaaatgcattggatattttagcaaggctttgaaatttggaagaggagtcatgtgtttcaaaacactgaaaatttaaagtgtttagctgtttagaagtgaggctggacacacattggtatccagaatttgatgggcagggattagcaatgatgcatgtatgctatattgtgacatactggaaattctattgaggttggataattagtccaaattcaaaaggaatgttacttgaaaaacaaaatgaaatttctcacataaatggaacccataaaaattacacataatctttgtcattacatattatgttgtacttgaaatatttgtgtttacacaagagccaacctaaataaaaactttatatttttattttctttggggtatggagatcattattgcataaaaactggaatgaagctctgaagaagggagttttactgtttagaatcagttttcatctcctccttgaatttgtaaatgacctaattttaaatgtcttatggcatacggagtatgtatttttcttaatattcattatctccctgtcatatgttcttgtgtgaatcttctattcatccttgggtttctttgagcatagatggtgttcagttactctcaataaataaggaagcaattgacagccctagaaattaatatccaaataaactgaggttcatagaagcataattccaaaactgaaacactgagctctgtcaatcctctgaagattgtcaaggaagtacatacaatgtgaatgagctacaacacagaacattcattccattggaggatttaggcaatttccagaaaatctattttttaaaaaaaaaattctatttttctaatttttgtcattagtttcttacaaatatctctgatgacaattgaaagacctatgaacataattataactttaattctattcatatttagcagcatgaaatttgtaggttttcaaactgagtctatgagaagtctagtcatagggttgcagtctcagtaatgatgccagctatgggtttcacctcatacggccctaatcaaatagcaaattggatggttaatccccaaatcttcatggcactattgcaccagtgaacaagtcttgccatactggttgttactgtatcccaaggataaacaacacagtaaagttaatgactattttgttcctccaatattgtgcatagtaccttccagaattggaaaatctggccagtagggatgaggctttcatgtaaatatcaccttgatttctccatgttctataactcaaggagggtgtcttctacagtagagtcttaccatgaaattctggagtgtaaccaagaacattaactggaggttatatgttggagttttatgagaactgactagccaataattttaagacaacaaattattttatcaggaaggattatttctaataaattaggaaagtattaaaagatcctgggaggatttacccatggtttgtaggtataaaattgtgtctatgaccaaataagaatcattaagtcaagcctgaaaggataaaatcaagaaactattgacacaattccatctaataaattctagggtgctgctctgaaaagcatatttgggaaattgacagtgatgtgaacacaaagaacccaaagatcacaatccaagcccaggagagacaagatgctaaaatgagggggtgttttgaggggaagcatgatggacaaggttcagtggctcagcatgagccgtgttacttcagtcatagttcattcaggtacactgtagtaagatgcagtccatttgcctatggatcacttcaaaatgagacaaaccagaaactcacaggcagttacgcaggaacaaactccaacgccaactaaagatggaaaaggacccaggattttaataatcatagactagactctaaacactgcaacaattactgattccaacacttttcttccaccacagctgccactggcctaagtcacctagagtgactaatggggaaggatttcctaaacttgtttactaagacacaagttccacatccattttgaacagtggcacagcttgtattaaactttttttctttcaccttatcaattgctgtcattcactcacacagaaatagccctgctttgaaattgtctatatgtgtgtgtaatcccatgttcatttttcatttttcaggattgtacataattttagagaaaatgagtgaatacaagacaattgttcttttaaaagtaatgaaggacatggatgaaaaccattttaggacaatcaagtccttattaagaaaaaaactaaatctaacgaaaaagatgcaagaggattatgacagatttcaaatagctgacctgatggaagacaaattcccaaatgatgctggactggacacactgattgaagtttgtcaaagcattgaagaacttaaaggccttgtgaaaaacctgaaaacagagaaggcaaaaggtaacaggggagcaccctgcacacttatcccttctcaacccttcccaagctgtctattttcctgcagtgatcagagctgataggtctcttccccactgagtgccctagaaactatagggctcgaagcatttcagatgtcaacaaactgacaatttcaagaattcctttctccttttcctttcttttttaatttacattctttaattactgctcatatttacatgtccatccacccccattccctagttctgccatcctcccattttccccaccaaccgcccccaacccaccccacaactcctccaccagggaccttcaaagtctgtcatattgtttgggggatggcctaggccctccttgctctatctgggctgcaatagtatccctccatatggaatgagctcccaaagtccatttgtgctccagtgaaaaagacaggctccactgttagagcccatagactgtcttggcctcctagctggcacccacattcagagggctttgtttgatccaatgttgtttccccagctttatggcaaggatctccatgctattagtaggtcaggtccactgtttctgcaggtctctcctgccctatcttggctcctttgattatccctcctccctatcctcaactgaattccaataatatggttcagtgcttatttgtgtgtcatccaattgctgtttgaagcagaaacaagaaaccctttcttaaagagaaaattgatatatttctgcatagacatcttttgcatttgaggtaaataaaataaaaagcagttgttaaaggagattagagtatccaacatgatgaaaaaaatagaaaatgatacagtgaaaaatgaaaaatcatttaaatagagttcaatttaatgctagattaagactctaacacattcattaatattttctttctggcaccagctaaaaggaaagagggggagaaaagcaacatcccagcaagaagacgcgggagagatgaacccagttcttcccaacctatgtccaccacaaatgaagatttggaaccagaatcaggcaggagtacactgaactcacaggtatggtggttaagctcccagtggaaaatccactaaggttcttcccctttttacattaagtgaatgcttatctgtctagtcataggatcttaaaagtggagatgtggggtaaccagtctcatacttactggtcattcgtgtgtcagaactatctcatactttaacttgtgttgtgtaattctctatgatgggaatgaaaaatcattactcaggcaagcaaggtggctctgcaggcagaggtgcttactgcctcactgatgacccgtgtttgattcccagatcccacatattagaaagagagaactaacacccatgtgatgtcttctgactttcacatggcctcagtggtacatcagcccatacatgcacaataaaggaacataaaacaggttaagtcatcgttcttcttatagacattgataaaatagcagtcagtttaaggacatacttttccaaagcctcttaaaggacaacaaacctccagctgggctttctaaacatagacctgctcttctgtcgccacgaagatgcacagaaaagtgatgtaaatgaaatttttgttcctgtataagacaatcctacctctgattctctgttcagagaatgctgtccccaaggatgataagtcgatgctcttggtgttaaagttattgtgctttatttaacattgaaaaccatgactgggggttcacaataaatctcaataggagaggagagaacagcttggcatgcacaagacttggggtttagtttccaacagaaaaaggaaaagagaaaatcaactgttatcaagacaaaaagaggtttcttcacggagaagtggaaacaaacccacaaaccctgaagactatgattctttcgtatgattaaacattcatcctattatcaaatgcttatgtctaaacctcagttaaaattaatctttttttcttgagaaggtataccatttgaaattattttgatctgaatagactatatgcagcagtttaatttaactacagttgttagatggtcagttaaaagattttaacctaaatagatgcatccagaaatactgaactattgttgcaaatgccttgggggcttaccaatccatctcccatgtttgacagactcctcatgtgtctgtatcaatagtctctaacagcctcctcacccctaaggtgctgtccattccttcccatattgtccaggtttctaggttatctacagcaactgcttctactccaacaaggccggatctcctaacagtgccactccctggtgaacaagcattcaaatctatgaatctatgggggccattcttattcaaaccactacactatagaatctacctgttctcaatgagttatgcacaggggttggagagatggctcagtggttaagagcactagctggtcttccagaggtcctcttgttcaattcccagaaaccacaacatgactcactaacatctgtaatgagatctggtgccctgttctggcctgcaggaatgcatgcggacagaatattgcatacataataattaaatgttttctttaaaaagaatgaggtgtgaacagtgacacaaatataatcaggatccagtaataaaacagattcttatggcctgggaaatatgatactttacttaatactaaaaatagtactagggctggggatcaaactgtgtggaaaagcaccactcaccttgtacaaaaccctggggttggatttcctatacatgtgaaaatcaataaagaaagacaaatattgttctttcataaatagagaaaaaccccaaaatactgaagatggcaaaaaaaaaaaaaaaaaaagaggaagctcactcaggagccaacacagcttctagaaccttcaggaagtaacatacaaaaaaaaatgaaggatgtctccagactcctcataatgattcaccaacaccatccagcagttcttcagacaaagcaccactttcctgttcccttcccaagcacatcactggactcatcacaacctcggaaaaatgtcccactgctcccctactacaaagattttcctcatattattcaatagctcattaagttacaaatcatatatcacagtccccatggtattaaaaaggtaagtatttatgatatgatttctaatgttgtcaaccaattttctgcttagggttcaaaagaaagtatagggaagacagacaaggataaacaagagaacatatcagtccccattgcctagttccttcttagcccttttccctttgctggtgacccaactttagagattattttcacatttctgtgatcttctccgtaggtgttttaacacatgctgtttcctcttggaagtctttatccctgcccattcactgagcaaatactttacatctgcaatggtcacttttgttgagactcaacttcagacctctcccagggatagactaaactctccaagacattcctcatcaatgaaagagtttccttttctcacattgatgctttcttaatacaattacagcaatcataaccttgaaaaaacttcttatctaatctcctaatcagtctcctcatctaaactgctgagccagttatattggaaatatagttcctgatgttagaagacatatatcaggaatcaaagttaacccctgccacccccagggtgaagtctgcaagtttctaagtcaaatttctgagattgctaccagttatagctgcctccatgagctggtacccaggttggcatgactgccaccatgctgtctctttcagttttatagtgctgcctccatttcaaagcaatttcctgatgctcagaaatggagtaggatactgaggaggcatgctataaagtaaaatgacttaaaaaacctgttcttgtgccaggattctcctccatgtccactattaggcaaatagaaaagctgctagcttgaaccctttctgattaagaatatttgaggggatcttcctgaggctgtctacctaacactaccagaaagctctgactttttagtcaatgttttgtaatcgaagtctttaaaatgttcctaggtagacttgactagagcattgtaggctttgtttcattccccacaactgtaaatataactcctccatctaccaggttaaattaatattaagtggaatcactaggtagtgatttaggtaaatatccatttcttcctttacctacattatagtatggcaatcattgtttagatattctccactctactcagtgaaattatgatctaactgaatcatgcatgttgatcctgtgtgtattgtatgcagacactagggagaggaaacataccaaaggagccttctaaggaacaaggatatcagcaaggtcccaaagaagtgatggtgttgaacgtaacagaaccatttacttacgattttgttgaagacaaaatgatgttccatgccacggtggctactgagactgaattcttcagagtgaaggtttttgacccagccctaaagcacaagttcattgcaggaaagatcattgctatatcagattattttggtgttggtggatttctggagatacacagcacttcttctgtgtctgatgtgagtgttaagcaaaggatggttatctcaagtacactgaggcagtcagccagtgcaactcctaaaatcaaggatcttttctcactaccaaaagggacatatgtcaatggagagtttgtggtaattatggtaagtcattgcattatttgtaaaatttcttcttcaatctgaggctttaagttttaatttgtcactggaatttgctcaacttacttaacacagaaagcaattgcctttcatatcagaatatataagtaaaatcactttggtgtttgggatagtctcttatcattcttctcttcaacatactaccatgagaattttttaaattcatcagtaaactttggaattttcttcactatgaaaatccatctatagccatcctattcccagacactgttcagtttatagcacgttttcatttcagagtttatttctttgatagcttccttacccatattataggcaagtcagtgtgaaggaaaactaaaactcataaactagatacagtttgagacaatgagaataaaaagccaaatagactactctgccctaaaatagggccatgtccaaccatccaagatgtgttttcattatcatagtctttaatttttaacaagaccttttagcagagtgactaatattttaaataatgagagaaagaagagcttaacaaactagtttaatttcacaatttacaatgagacaatgaaatctaggatattaaaggaaatctgtgactttctggtgtttctttaagtgcctatgtaccatttcatcagtatgtttgttcaatgtttgagtccataattcattgtgtatgaatcacagtttttagtttaatctatgctatttttgtttgtgccagtacatttggttacacagttaataactgggacacaaactagaatatcagaactaaatgctgtagatataacccttgagggattgggagggagtgagcaaatcttgggtaactgaacaaatgtgaaccatttcaaaaggaggtgtgtgtgtgtgtgtgtgtgtgtgtgtgtgtgtgtgtgtgtgtgtgtgtgtgtgtgtttgtctgtctatctctgtatgtctgtgtatttatcatgctattccttttatgtctgtcagtttgtacactttgttttattcttgttggtttgacttctttattcacctgtttgttttcttaagagagaaagaaggtgtgcagttggaaaggtagggaggagaggattatataggagaaggtaggggaagggaaattatgagtagaacatagttttatggaaataactttattttcaataagaataaaataaattaaattaaaatatcttataataatgtttctcagactcacaatgagtcacaagtagcctttcttctcagacttcctggacatacctaagaaacttgcaatggtaactaaataggttttgttatttatttttgttttttcatttttgatcccttactcagatccctgaaaaacctcagcaattctgatgttaccactagtacttagtaagatattcactgtcctaaagacacccagcagatgaagtctttaggtaggtaaaacttaacagtggcttccaagagatgcactcatggctccgtcattaaaggctaggctcacaaaacctcaaaagtgattaccaagtaaagttttgttctccagaataccttaaactcttttatccctgtaattgagggttttttctttccagttatttattcattttgtctgtgaggattgagaggaaatacaaagaccatgaaagcattatggagtcagtagagaagctcccctatgtgagttttgtccttctaccatgagtagtggtaatatggcccagataatcaggttgccaacaaacacccttacccactgagctatctcagtggcccttgtgcctacgattctaaacctaagagccacactttccttgtcagggccacatttatgccgacacactttatttctgcttgattcgacaagcaatgacacatttctgaaaagatgaaagttaacttgtttttcagaaaaatgagaggattaatgagatttactattggattggagatgataccggatcaatggaagtggtggtctatggacgactgacccgtatcaggtgtgagccaggcaataaacttcggctggtctgctttagattgacctcaagtgaaaacatatggctgctgaggtctgtaaggcacagttacatgcaggtgtgtgctctgggaaatatcgttcttcctaagaatcataaatacatatttaatactctagtaaatcttgactattagcattgcatggaaaatccaacaagtggaggaaaattaagctttgtgtatttaataaattttttacattatttttaagtaagggtttttaaataataataaagaaaataaattcagatagactcaaaaattgataaatggttagttaaataataaaacctatttctttatcaaagcagagtgataattcagaaggactcaggttaattaagatgtttgtttcaaattctgactctgattttttttcaaattgaccaaagactgaaacacaaagaacttggggacttcatttgtaacattcaaattctcagtgttacataagatcatgaaaagaaatgccaagtccccaaggctaccctgagcaaatcagaccacaatatgctaaaatccacaatccttgtcatacttacacactgtgtgggattcaatttacacttttactaaaaaggtcactattacagtgtaaacagaagaaatataagggatcacgtggatattcacatagaaatgctcttaaagtaccatccttctcagaccatcagccaaagtttcaaaccttcccctacagcagctgcaccagcaaagccttttctccctcctcccaacctgcagttcagtgagaatcagcaactcaatctttacctcaggtacctcagccctttccactgtagctttgtgctcaagcctgtaggagtgactagttagtttcatagttccaaacaagctgactgcaaggacggagaggcattatagagataggccagagtgagaagggggacgtgacacagtaggactgtagagagaagagtggaaccatctgcatttcaacggatttaacatctacgttttcttctttaaggtcatcaatgtgagaaggaaattctatcaacgctgattcaattctgaaagcctccctagaaatgctccttctcttgaactccatgaaaggggctccaaacaaaaactggggcccttgagctcctgtcctcaagtggctcactacttactgctcttcatacatattcttgtctaatcggtactgacacttttccatgaataaagtttcactgcttatttgctatctgtgtgagtcttaccccaaatctttgaatgaaaatagaagattttgaaaacaccaggcttggattctgaccacccccatatcctgtaacaaagacacgggaagaaacctcatcaaatgctcaagattaggtcttggattccaagctttcaacattcagtattacatttattttacttatataacactttatctgtagttacctggcacaatacaaaacaaaaggaaattatgtattttccataatagtaagaaacagggaattgtatcttatatagaactaaagtttcaaattatatggactacaaatgctgtgcaacaaagatgaaaataacggtgtcaaacctacctacatacagtaggctggaattaatctatatctatgttgtaggacaatatttctgaagaggagtaaacaaatatctcctaaccccaagccaaagtttagatataacttaaatctgatttggtgacataatgagatacatatttattgtggttcttatagtaatattgacaaggcgttatttacaagaacagaaatgactcaaagatagttttatcatcaaaagaaatgacagttcataagggctggtgtcatgacccggcatgtctcggtcttaacccatgaggttcggcctgagtgggggtgtgtagatctggaaactcctagcaacccagcagcaataaagaccaaacacaggcctcttgtcatctttagagatctctcagttccatgttgtaaaactagagtcttccctttgtcatctttttggctgtttcttagccatcctgccatgaccacgaggagataacttctgtcctgttctcctgtctcttgatggctcctaaccctccctagttacttacacctagtccctctgtccaggtgcaggcctattcagatgcttaggcccaatagagatgcaaactaggagacatcctatactgaggctatggtaagcaatagtagacttgctcttaattagcaatacaatagtagactggagcttctggttgctcctgttgagtgaaactggaggctggatctcaaaatatttcataacggaattatttggtcctccacagctggaaacctagtacacacttgacagcctaaggacagtacaatacattagagagtgtctttctcaggtagttcagttgctctgagcctcttccaggtagcttgactggtttctattatgtccaggaatattagcttgtctgtgagtgcctagcaacactcctttcagtctacactttcttggggatgggggaacatatttaatctggtttcagggatttcctgtagcttctaagttgttttcttcttgaccctaatgatcttccttgtaggaagggtgttcccacccattcttaaatgtcctgctactctgcatgcatttgataacaccctgtgtgttaacaagttgtcctctaagaaaagtgaaagattgagatcctggagaaaactgcagtcaccctgatgtttacataaggactcaacgcctctcctgcccgaacttatgccactcacagtgtagagaagaccagaagcaaagttgtcagtttctttttgagtttggaagaaaagaaaaaaagtagaatacttggcataataatggcaccattattacagcggtaaccaactgctttcagattggatttgaggtctgcaacagaagagaaaattcatacccagcactatacacctcatgaaactccccagtaccaggaattggttaagtcttgttgaatttttggccaaagggaatccctagatctccctcaaacattgctggttctttgtttgtttgtttgtttgtttgtttttctatttgtgtatgtgtgtgagagagaggggggaagcttgttgatgatgttgagcagtagggagatagggaaaatctggtaggagacgggaaagggaagagaccatggaaaattttgctgtatgaatttttatttataaaaaccaataagaaccaaaaaggaaaaggaaaaaggaaccagcagaagtggcagcattacagcaaaggtgcatgcagcagagcagcatgacatgcaggcagtcagcatggcaaatgaacatgatgacactgcaggcttccagaaggggcagctaaacaatataaggacagtggtctcaacaggtcacagcagcatggcagaagtagaggattaagtaccaaaggcatagagaattagaggtgaaaacctgtagataatgaccataggaagacttcctgaggcctgtggagcatttggagccaaggttctcaggtaccctagacctagaatcgttaacactggctgctgtccaagactgaagactcccaatacccaagctctccatgaagctataatcctaggccaagtgaatgctgagttcctaagccttcaggaattgtaaggtttggaaagcagagggtgtgaatggcttaggtctgactacacaagagcaatagagccttgatgcccaagacttatgagcaaactgcatgcaggactagaaggcaggattgtaactgctgctgcctgcttgactgctacattctctctgtcaaaatcattgggcacaagagctgcccaaaaccagcatttgaaaactttcttgcatgcctatgtgcacatgggaccctaacctgctgaatgatatcaccccaagaacatattcctgtttgcacatctgctggagtgttctcaccgacatccactgcctggcaccatttgtactgtgtctccaattacatgagacaccagagagtccccactgtccttgacagaaaacaaataggttaatggtcatttcaggttcctgatgttactaacacctaagagcttagccacagttgtcaaggcttcaatggtgttattacatagacccactatacctgctgggttcagccataaataacaaatagtgcagaaatgctaaggactcattaacttaatcactaaaggaaagcagtttagcacttgtccagatggcagctaattccttcccatttatccatcattacatttgtaagtgtgtgacgaaatctttcttgggttattttcaggctgggagaactattaatgaatgagagaatgatttagtagtgcttaaaccaaaagtaactgcactacataatgcagccctggagtccagctcccagaactgcatagggttataattagaatgccttagagtaggggtgttcaggaaagtcttatctatataaagactcacgtacaagatctgagggtcatgttcttcgtttttgttcagctttgatactcttcattttcttcattctaatctgctttgactctctgctgcttatgtaacatttcagcagcaaactcttgcaattaaaaaatagttataatgggtgcatctggggggaatgagtaaccacagcagtgcccggcctcaaagttgccggtgtacagacactgagacgaggtaggggggcacactgctcagtgagacaagctactaagagattttcacagagtgaaaaaattcttcatgcttttggcagttgggggattgtaacatcctggtccaatctctgggagttccatcttcttactaaaagaaaattgtcctgcttcttgccttgaggggaactggcatctggacactgctgaagaaattttcaaggtgagtcctgcctctgctatgtagagttgagctctctgtgaatcacacagggcacaggggaaatcagtgctgcctccttcagaggtgagtggagaaagcagggctggtgccagctgccttcagggcagtgaacctgcagcagccagattccaatgcttcactagggaacatggcagtcatcattattctacccttcctggggctggagccaacacaaatgttttttgatcactgaggacagtaaaatactgaaaaaagatatatgtatttttgtatatgactggtctgtttgcatgtacacatgcatgacggaattgggcaccagatcccattgtagatggttgtgagacagcatgtgttgctgggaattgaactcaggacctctggaagagcagtcactctccagcttgtaaaataactttctttcttttctttctttctttttggtttttgagacagggtttctctgtgtggctttggagcctatcctggcactcgttctggagaccaggctggtctcgaactcacagagatccgcctgcctctgcctcccgagcgctgggattaaaggtgtgcaccaccaacgcccggcataactttctaagtgtaagtactagtaaatagaaaatgagaagaaggctttagttatcttggctgtagagagagaaggaagttgttgactagtgattgactgcgtaaatgataggatagtgaaatgaatggattaacataaatttttatttagtgaaaaagataaatgacctggaattgcactctctagtattccactattacacagcatgagaggtgatggttatgtgcagtagaaatgtttcagatcagctactcaaacaaaacatgttttaatgcttttataatgacatttaacaacctgctctgctgccctgtactccagctgtcaaagcagtattcaatcactacaagagagaatttccatcaactggacagttcactgttttggttagttggtgtttttaatttcttacagtgagacatggggaagagttagagctcatttgaaacagatttctattacttacttgtggaatgttttacaggctgcccgtgtgctctgatatagcccttcatgtatacttgaaaagaacattgtaaatgctgatttggggggctgttaccatattagatgaatcctccccagtttatcaattaaattgctaaactttctaaatctttgcagctgtttcactttgtccatttagtaactgagagtcacaatgttgaatcaaccatggatcagtgttagctttttcttgtgtttctttcaaattacagtttgtgtgtgctccctcatcacaaatggaatgtccactatgtatatatgtgagtaggtgtgtgtacatacatgcacaaaggaaacaaaatatattctagaacactatttttgagacgtgaatgaacatgagcagtaagaaatgcaatgcactattttattaaataaattcataggccacaatagtgactttttaaatgtaaagtacaactgtataattttgtgatagctattaaaaaaactttccctgcattccatttaaaagtacattactataaacaatctggctttccttttgttattgggtaaagtaatttatttttaaattattccaccattaagacatatttcacaaacaacatatacgtgcatgtcattaaagggtaacaaaaattaaatttaaaattttagtgccaggctagtctcttcatgcatagactgataacactgtatttttgctttgttttgttttcattatctgtccttcacattatggcatttcctccttacattttaagacaaataaattagtcaactcgatgtccttttttctgtctgtcaaccatattgatattctttctgttcctcctgtctttgaccagggcttcacttttgaagcagaagcacacccttggtttgaagtatttctcagttttactcactgttttcttcccatcttaccattataaattactgggatctgagtgcagtagaatatttctgagaatttcccatgctgtgtcatttttccctaggctaaataaactggtttgaattatgtttagctcacacgccctttatactggtggaactgaatatattctcatattgagaatttggctacctcactcttatatattctgaatgcaatcattatgcccaaacctaaaacaattttatttccacaacaaaacatggatgctcacatgtaggtcagattcattaaaagtaaacacagcctcttggattgcacatataattatattttggatatacctctgttgtcacaagtcataaaaggtcaaatttttcaaattttgtattctacaattgaggtaggacttcagtatggtttaaacatcacagagatgggaaactgtctctgtgaacaaatgagttcatctaaggaaatcaaacctaaaaggagtaaaaccaaacaattattgacataattccacctagtaaatattgtgacctgacactagaaaatacacagatgttcagcaaagtgacagtcataggggcacaagaagacacagagagcagggtgcaaacaccagcatatacgagattacaataaaaactgcttaagaaataggaagtgagatgggccatagggctgcagtcaaccatcattcctgtttatgatgaaagcatgcagtccgtttgcacacaagccacttcagccaagggtacaggaagagtcaatcacacacgcaggggcaagctcagcactaataaggaataaaaggaggactcaggattttaacacgcacaactctaaaggctatagtgacttctagtttccacactttcttccaccacaaaccatgacaggcttaagttagacattaacagggaagaatttctagacttgtttattaacagatcaattccacgctaatttttaacagtgtcacatcttgtatttaaatctctttttcttacacacacacacacacacacacacacacacacacacacagagagagagagagagagagagagagagagagagagagagagaatactatggaatgggccattcacttatacaagaatattgtatttttggaattgtctgtgtatgtatgtaatatcatatgcatttttatcttttaggcacatgcataattttagacataatgaatgaataaaagaaaattattcttttaagaggattagaggacctagatgactaccaatttaggacaatcgagggcttattaagaaaagaattaagactatctaaaccaatgcaaaataattatgatagaattcagatggctgacctgatggaggacagattcccagaagatgctggactgatcaaaacaccgaaaaacttgaaaaccttatgaaaaagcttaaaacagagaaggcaaaaggaaacagggaccacgctgggagcccaccctttgtcaaccgtccccagctagtaatcatcctcaagaacttctttcatacaataattttatgtatttgacattggtatctgtcctcagtcctcaggactgagttgaatttttttaaaatcagaatctattgaatgagatcataaattccaatataatagacacattagaaaatgatgaaattattcctgatcactccaagaccttaatcaagaaggggtgttggcttttgtcaaaggctttttcagtatctagtgagatgatcatgtgtttttttctttttcagtttgtttatatggtggattacattaatggatttccatatgttaagcatccctgcatccctgggatgaagcctacttgatcatgatggatttttctgatgtgttcttggattccatttgccagtattttattgagtatttttgcatcagtgttcatgaggaatatgggtctgcagttctctttcttagttgtgtctttgtgtggcttgggtaccaaggttattgaagccttgtaaaaggagtttggcaatgacccttctgttctattgtgtagaacactttgaggagaatttgtatcagctgttctttgaatttctggtagaattctgcattgcagtcatctggccctgggctttttttttttttttttggttgggagacttttgatgactacttctatttcattaggggttataggtttgtttaagttgcttatctgttcttgatttaattttggtaagtgatatctatccagaaaattgtccatttcctttagagttttgaattttgaggagtacaggttttcaaagtatgacctgatgattctctggatttcctcagtatctgttgttatgtccctcttttcatttcttattttgttaatttgcatgttcatttgctgctgtttggtaagtttgggtaaaggtttgtctatctttttgattttctcaaagaaccaacttttcattacattgattctttgtattgttttcctagtttctactttattgatttcaaccctcaatttggttatttcctggcatgtaatcctcatggggtgaatttgattctttttgttctagagttttcagttgtgctgtcaattctctagtgtgactattctctagtttcttcatatgggcacttagtgctatgaaatttcctcttagcactgctttcgaagtgtctcataaggttgggaatgttgtgtcttcattctcattgaattataggaagtctttaatttatttttttatttcttccttgaccatacctaaacataataaaagcaatatacattaaactaacagctaacatcaaattacatggacagaaactcaaggccatttcgctaaaatcaggaaaaagataaggctatccactctctccatatgtcttcaatattgtacttgaagttctagctagagcaattagacaacaaaaggagatcaaggagatacaaattggaaaagaaaaagtcaaacattcactatttgcagatgatacaataatttgcataagtgacccaaaaaactctaccagggaactcctagagctgttaaatgtcttcagcaaagtgacaggataacaaaattaacaacaacaacaacaacaaaaaaaaaaaaacagtagccctactacatacagacgataaatgtgctgagaaagaaatcagagaaacatcaccctatacaattgccacaaacaacataaaataccttagggtattgctaatcaaacaagtgaaagacttgtatctcaagaactttaagtctttaaagaaagaaattaaagaagataccagaaaaggaaaagatctcccatgatcttggataggtaagatcaacatagtaaaaatgtcaatcttgccaaaagcaatctacagattcagtgcaatccccatcaaaatctcagtacaattcttctcaggctttgaaagaacaattctcaactttatatggaaaaacgaaagacccaggatagccaaaacaaccctgtacaacaaaggaacatctggaggcatcaccatccctgacttcaagttctattatagagctatagtcctgaaaacagcttggtattggcatgaaaatagacacagagaaaaatggaattgaattgaaaaccctgatattaacccatacacctacaagcatctgatttttgacaaagaagctaaaattatacaatggaacaaagaaagcatcttcaacaaatggtgctgacataactggaagctgacatgtagcagactgcagatagatctatatttattcccatacacaaaacttaagtccaaatggatcaaagacctcaacataaatccagccacactgaaactcttagaatagaaaataggtggtaccctccaacgaattggtagaggaaaccacttcctgaacataacaccagtagcacagacactgagctcgacaattaataaatgggacttcctgaaactgagaagcttttgtaaggcaaaggacacagtcaacaaaacataatggcagcccacagaatgggaaaagatcttcaccagccccacatctgacagagagctgatttccaaaatatacaaggaactcaagaagctagtcaccaaaacaccaactaatccaattaaaaattgagaactaaatagagaattctgaacagaggaatctaaaattgttgaaagacacataagaaagtgttcaacattcttagccatcagggaaatgcaaatcaaaacagctctttgataccatctcactcctgtcagaatggctaaaataaaaaacatcaatgatagcttatgctggaaaggatgtggagaaaggggaatactcctccattgctggtgggagtgccactggtatggccatgttggaaatcaatatggtagttcctcaggaaaatgggaatgagtctaccagaagatccagcagtttccactcttaggcatatagccaaaagtagcacattcatacaacaaggacatctgttcaaccatgttcatagaagcattatttgtagtagccagaacctggaaacaacctagatgcccctcacttgaagaatggatggagaaaatgtggttcatttacacattggagtactactcagtggggaaaaaatggaatcttgaaattcacaggcaaatggaggaaactagaagaaaccatcctgagtgacagaacccagtcacaaaaagacaaaaatggtgtgtactcactcatatatgaattttaaacatagagcaaagaagtagcaacctacaatccacagggccagagaagcaaggaaacaaagagtaccctgagagagacttacatggtcccccagagaaggggaaagggacaagatctcctgagctaattgggagcatgggggaggggagagggagctaggagaaaaataaggggaaaagaggaggggaggggaggacatgagggagcagaaagatttagtcagaggaagaaaagaggggatcaagaaaagagataccataatagagggagccatcataggtttaaagagaattctggcattaggaaaatgtccagagatctacaagtttgaccccaactaacaatctaagcaatagttgagaggctaccttaaatgccattctctgataatgagattgatgactaccttatatgccatcttagagccttcattcagtagctgatggaagcagaagcagacacccaaagctaaacactgagctgaactctggaatccagttacagagagggaggagtgatgagcaaagtggtcaagaccaggcaggagaaacccacagaaacagctgacttgaacaaggggaagcccatggaccccagactgatagctgggaaaccagcataggactgttccagaccccctgaacgaggatgtcaatttggatgtctgggaaatctatgggacctctggtagtgaatcagtatttatccctagtacatgaatggacttttgaagcccactccacatagagggatactctctcagcctagatacatgggggagggtctaggccctgctccaaatgatatgacaggcttttaagatccccatggaagacctcatcctccctggggagcaaaaaggtgttgggatgggggtgaggtagagggaactgggattgacctgtaaaagaaacttgtttctaatttaaaagtggtctagttacaattataaacataaaaataataaaataaaaagaaaatggcaaagtaaaattaaaaacttaattgaaccagaatgaattgcatattgcatgcccatgtgaagttatcggataagaaattaatgttatgggctgaagagctggttcagttgttaagagcatttgttgttctttcaaaggatccaggtttgattcccagcccctacatggagtttcaccacctgttgctcttaggcaccaggcatacatgtggtgcacagacatgcatgcaggccaaacatttatatacttaagataccaaaattaaaatctgaaactaaaatttgaaggcagaaaatgatggaaagtcaacataaaacaaattaatgttatatgaagtattttaaaataaaaactaatttagaggaaagttcattgataattatttaaatattttaatgctcatgcttaattaatatatttactccattattagtattcatctggcattaaatgtgtgacaatatttattaataacaagtaaatctgtatcttggagatattatcaagctccctttataaatcagtgggtacaaaaatcacgataaaaattaagcatagtggtacatacctatgccatctgaactcaggaagttagagcagggaggattccattgtgagaccagcctgggctacatagaccctgtaccaaaagacaaaatgacaacaacaacaaaaaaaaaaggtaagaagtcaaagtcaaatatcaccactttgccatgtcgcaatttaaatcataatttctttttctgttgctgtaatttggaatgatcttctgcagatgatgacaaaccattatcatcatataaactttagaatcacacatgcatggtgattctatacaataagagggtctgagcaaggtttgatggatgtccacagaaatccccaagagaggaagactgttcatggtgcctgggaaaggctaagaaacctgaggcagtatttgtccttggcgtgatacctttggccactttgtgtctatgctgggcttctgagcagtggtaggcctgcacgctgagacacaagcaggaactgagaggaagtggtaggatcaacttctgctcttctaataacagcttcctggtccactgtgctttctttactgtatcaattcaaaggacaaagaaaggcaaacaagaaactgcattggccaaacaaaagccagctgaagccagtacttcccaacatatgtccactgtgaacgaagggctgggaccagcatcagtcccagagaccctgtcatcacaagtaaaggggccgagctctcaagcaaaaagcttctaccctggttcttcctcccctctttgtcctttttgagaaaaattagtgctttacctagttcaaaaaaacagtgaaaatggggtttagtgtcagcaaattgatggtttctagttatctgttttgttttagaactacttcagtgcaatataattcccagcgatggaaacacaaaatgattgcatgtttcaaaaagtacttactatggtgatagtcagttaaatagcatggctttccaaagatggttaaaagatttaaatctaaactggacctgatctacatagcaagttccaggccaaccaagaccctgtcttttaaaaaagtaaataaacaaaaataaaatcttctaaactaggactttttagctgtaggcctattagtgttctgtcaccacaaagacgaagagagagacataaataaaacgattctgctcctgtgtaaggtgaccctgtgctcacctctaactatcttttaagagggttgagtcccaaggacataagtataatcagaatatattaagataaagtgagctctctcggtattaaaaatattatgttatctagtatttagaaacaatactaatggttggggatgaagcgcaaaagcacggggcccccagttcatctccaacaaacaaaaaatgaaaatcggtattaccaagagaaaatggcaaacattaatctttcagaaaaagggaaacaagcccagaaaaagaaacaacacctcaaggatctgggaaaatgaagcttacccagtagaagcagcttcctgtgagatcttcagctgtcaacacacaggaagacgaggattgtccccgaactccttgtgagaacccatcactacccagcagattctcaaagaaggtgccgccatcctcttcccaatgctagtgctgccctaaagcatatcaccagaatgatcataaccttggagaagttcctcactaatccctgattccactgacttcatcatacaagtaaatcaatcattaagttatcaagttcatgtatcaggatctcagtgtaggacagagcatttgcttaggagattatgagtttaggacacaagagcatgtccatccctgctatcgagtttctcctaagccctttttctgttgcttgtgataaagtttagtcacattgttctatacacctctcagcagctgtttggacacacgtttttttccctgttttcaagttcatcaccccgtctctccactagccaatctacactcaacactaaggtgccaggctggctgatcctcaggctgttcctcactgaaacacccttctgagaagagcagacaagattctgttctttcttcatagcatttaccttattggaattaattaggggttagctttcttcctgctggacagtaagatcaaaccaaaagcaggctgccatggctgagaggacaaaggaagataagccaagtcacacctacagccatcaactcctatcataacacccctattttactccttttcgttttaccccactttatgtgtcttgatataatttctgtgcttacctgtaacctagagctttgaaaaaattaattggggtggtgagcacaagaaagtttgtacaattctacagaaggggacataagtatagaaattaaatcactattttctaatgtgactttttttgttttttttttccttttttattagaaagaaaattattttacatatcaatcccaggtccgtctcctttccctcctcgccatgccccccccctcaactaacaccctacctatcccatacctttctactccccagggagggtgaggccttccatagggggtcttcaaagtctgtcatcttctctaggatagggcctaggcccacctccttgtgtctaggctcagggagtatcccaccatgtggaatgggctcttaaagtcccttcctatgctagagataagtactgatccacaacaagaggccccatagctttccaaggtctcctcactgacacccacattcagggggtccggatcagtcccatgctgatttcccagctatcagtgtgggcactaagagttctcacttgttcaggtcagctgtttctgtgggtttcaccagcctggtatggacccctttgctcatcagtcctccttctctgcatctggatttcagtttggttcaaggtttagctgtgggtgtctgcttctacttccaccaggtgctggaggaaggctatacgatggcacatgaattagtcatcaatctcattatcaggagagagcatttaaggtagcctatcctctgttgcttagattgttagctggtgtcatctttgtagctctccagacatttccctagtgcctgatttctctttgaacttataatgtctccctctattatattatctcttatcttgctctcttctgttcttcccccaactcaacctccctgccccatcatgtcttcctcaacccttctcttctccccttctcattctcctagttccctctcccctccccccatgctcccaagttgctcaggagaccttgtccctttccccttctccaggggaccatgtatgtctctctaagggtcctccttgtttaccagcctctctagcagcctgggctgcaggctggaaatcctttactctatgtctaaaatccacatatgagtgagtacatacaatgcttgtctttttgtgactgggttacctcactcaggatggtttcttctagttctatccagcctacgaatttcaagattccattgcttttttccccccgctgagtagtactccattgtgtaaatgtaccacattttttctatccatttttcagttgaggggcatctaagctgtttccgggttctggctattacacataatgctgctatgaacataggtgaacagatgttcttgttgtaggaatatgcttcttttgggtatatgcctgagagtggaattgctggatcttgaggtagactgattgccattttcctgagaaatcgccatacagatttccaaagtggctgtacaagttggcactcccaccagcagtggaggagtgttcccctttctcctcatcctctccagcataaactgtcattggtgttttcaattttagccattctgacaggtgtaagatggtatctcagagttgttttgatttgcatttccctgatggataagaatgttgaacactttcttatgtgtctttcagccattttagattcctctattgagaattctctatttagttctgtaccccactttttaattggattatttggtattttggagactagcttcttgaattctttgtaaattttggagatcagccctctgtcagatgtgggggttgatgaatatctttccccaatccatgggctgtcattttgtcttgttgactgtgtcctttgcattacagaagcttctcagtttcaggagtttccatttattaattgtcaatatcggtgtctgtgctactggtgttatgttcaggaaacagtcttctgtaccaattccttccttcaagggtatttcctactttctcttctaagaagttcagtgtttctgggtttatgctgaggtctttgatcctttgggacttaagttttgttcatggcaatagatatggatctttctgcagtcttctacatgtcagcatccagttatgccagcaccatttgttgaagatgctttctttattccattgtatagttttgacttctttgtcaaaaatcagtcgttcataggtgtgcaggttaatattagggttttaactcgattccattggtctaactatctatttttgtgccaataccaagctgttttcaggactatagctctataatagagtttgaaatcatggatggtgatgcctccggaagttcttttattttacagtgatgttttgcttttccatataaagttgagaactgttttttcaagttctgtgaagaattgtgctgagatttctctgtggctttggaggctgtcctggaactagctcttgtacaccaggctggcctcaaactcacaagagatccacctgcctctgcctcccaagtgctgggattaaaggcgtgtgccaccaacgcccagcttcaaggcttgagctacactcctacccaggttgtcctcaccaccagtggaacaacagtggatgactctgaagactgggttcctacagaaaagaactgcctgattttagtttaattttcccatggatgttattgattatattagttctaagagtctacatttcttttaacaatctctcataaaaggtgaaagtaatatttctgtcattgcttgggatttatgaggctagagacatgtattggaaacaatttgtatattatcttgattagaaagagacagttttagtaaactataatcacaatagcctaggaatgttctttattaaaatgaaacaaactagaaatagaactatctggagtcagtatgcaacacacacagaacccactctttatccctagacatgaaagtgttctctggattttaattggtgacagagcagtgtgtgtgtgtgtgtgtgtgtgtgtgtgtgtgtgtgtgtgtgtgtgtgtgtagttcattaaactagaaagggaatcttgagagaggaggaagagatcttaaggaaggggattactagagatgtaatacatgtattaagaaaagagaagtgaaaatcagtttgaggaatgaagaaaacaagccagagaaatacaggaacaaggagaaggcagtggggaaaggaccaggacagagaacagtgtaatgacacaagtatatgaaactgccaaatgatgcccatggttgtgaagttaacattaaaacataatcctaataattctaataaatatgagaagactaaggtagctggagggcagatggtatgagcatctgaggatatgctgttatccagaggaaacttgagagtagattctctataaaaagatattgctgtgtgtggaataaaacctttatccagaaataagttatttaagtcttttttcattcagaaaaggaagaactcaagcaaaaattctaatgatactgcaagaaacaggcaattgtgggtttgtaaccatatcagacaccagcacagaccctagggctccagcaaaccctcccagctctttcttcatcaaaagtaagaccttctgttcctactcagatagatgccttcttaacataattacaataaacataatcttgaacaaaatatcttctcatctgaactccaatttgttaatttaattaatattatgattcatcaggtatatattttgagatcccagccacaattttcaaagtctgattattttatcgtatgataacaatgtatcaggactctagatgaccagtatataattctttttaataattacactggcattatttggattatgcagcataatcttaggtttatctaactagttgtgttcctaaatggtgctcctaatataattataaaattgcattatccttgatgaaaagtcattattaataataattttggtttggatgacagcagcctggtaaagctattttctaatttatcgaacttgaaccacatggaatcaccaatatacacaagaaaacaggaatgatggacatcatgttatttgagtaacttacctgttacttttgaagaagaatttagaatctcaaagtagaaaagtatattgaaaaactctaaatagatttgtcatcttatacgcaaatgtttctcattatgtggtggttttattcagccagaattagaacatggcaatttaaaagacttgaacctagtccgatgcatgaatgagtcttgactgggttttgtgaatactgctcaagcactctgccaattgatctagatgcctattccatgacactctgactgcacagtccattctttcagggcacctttaactttgtctcctgccattctcaggctcttccaatgcttctaacagcgtcccatggtctccaggatcctcaagtgcttccagcaacatcatacagggtgacaatttactgcatgatatatattcttttaactaaatcactatttttgattaaatatatactttgaaatcttgcacattgctttcccgtctatgctattgcttggctttgactaaggttttcctgctatttgcaatctatgtgagcttttgtttcaagtctgagatgcagacaactgagatgcagaaacaccttacccaggccccaaccattgttaacatgtaaacagcagcaaagcaccatcaaatggtttcccaaccttcagtactataagaataaatttctgtttcttgtcaactattctgtctgtgaacttatgctataaaaacacaaattagacaaagataccagcaatctatgtagttaggtacaagagaccagtaagtccaataaacctgagttttcatttactcacatatcccctgcatgctaagccaaaagatggaataacagtgccaaatctgtctgtagtaggtaaaatctggtttgcagtaccctagtgtttacacaaagacatactctgctctccaaccccaacctatgcttcatcattatttcactcaaagtagtaagaaaggccagtagaactactgtgtggtttttcattattcattcactagaatagccagtataatagtgacacaaatgttatagggctaatcaatggctttctagaagtatttgagttctggtacatgggaagaaatccatgtctggtattgtacacctgttcaaaatcccatccatggctggaggacctactgctgctgctgctgttgtaaacagcctgctgtcaaactgccttctggatattcatgtttgtattcctcaataaatattgctgttaacatggaaactggggtgggtttttttgtgttcttaatcatgttaatgaaaaaaattttgaaatgaactttgaaggaggttcaaggacaattttactacattttgaaagaaaaataaccaggcatacgatctgtaaatcgcaataaatgcctacagtgggaagactaggaggaagagtcatgtctttcggggttatggtacatgcaagcaggcatgcttggtagtggaggctagccagcagctacatggcagtagagaaggcaggcttcagagtaaatgagaactcccaaattatcaagtaaatggggctaggtactggactagtatcagaaagaaaaagatagaaagaaagaaaagggaaatgtgtgtgagttttagcgttttggaacagttagccagcttaatggtgcttgctatgtaggagaagctctgttaagtggcttgtgagtggaggaacttctatgaagtctaagtttattatttcattaaggggataattactcctgccttctccttagcttgtcttcagctggaagaatggtctttaggccagtagattgtaggcctggatgacttttaagagaggcaacaacgtaggatgcagtactctgaacttaggaactaattagaatgtcattctctaccaaggaccagaggtggaaatgagattccattcttttgaccataaggaagtagttttctcttagtgattatctttatcagtgaaaagggccaacttaactatagacaagaggaaggctgatgccaaagtgctttctcttttgttgtgatatattgtttatgatctaataaagcttgcctgaagatcagaatgtaaagctagccacagtcattgggcccagctggtggtagtatactcctttaatcctagcagccacactagttaaccatagaaactgggcggtggtggtgcatgcctttaatcccagtacaagagaatataaaatgggaggagacaggaattcactccttttaagtctgaagatatggtatagctaagagctctctagtgtctgactgcttttcttttctgatcttcagcttgaaccacagtatctgtctctgggtttgtattattcatgttacactctattcaaggtccaagtggtatgtttgtaacaacattagactctggaaagttcattcggggctggggaattaataagtgagtgattgaatgctgcctgaagctcttaagccaaaggtgatttcatctccgattttctttgaaatccatggaagggcagctggcaactaacagggccaatctctcctcctgctttggccttcatcctgaacaggaaagaaagcattgtgctggtgactcagctttccctttgaggtttcataccatttaaaggaatttggattcctagggactcacttgtgatttggttggatacaaagctttgaaatttgaatcttctacctataagatttgtaagaaaaaccaagagaaaaaaaaaaaccaacaacatcaagcatcaccatctctgacttttcatggtaactacaatgtgtacaggaaagaaactgctgagtttcagtgtatgaggaaatcgaaagctgtgaaagcactgggtggaggctcactctttttctcctctacctgcaaaacaacacaggatgaggcacccaggaaggctcagtccttcaagtagtataacctttgaacttctgtatatttcattctccagttcctaggagacttattagcttatctacacacacacacacacacacacaaacaccgactggcccctctaacacactctacaaagaggaagaaaaagaagaggaggaggaggaggggagaagccttgtatcctaccctgtagaagacctcaggatcctgacacctctgaagaaactttcagcaacgtgagttctacctctttctgtagacattagctacctctatgaaaaccacaagaacagaggggaaaatcttgctggttcttctagggttggggaagcagagctggtggctgctgccctcagaaatgaacctgcagcagctggattcgggtggttcactcaggaagatggcaacatctttattcctccactgcagaggcatgagccaagaaaaatacattttgcatatttcaggttgtttaataaacttcctaagtgtaagcctgagtaagtgggtaagaggaaggctttagttatctattcctgaacttgaggtctgccctggagagactaatatacccaccatcactccatcgatttcccagcaggtttaaatgacagttcagttgttaaaaaaaatacaacaaaataaaatataataaggtaaaacaaaaactatcacatccaagtcagacaaagacaaacaaacacagggaaaagtccaagggaaggcacaagaatcagagacccattcattagcacacttaagaattgaataaaaacactaaactggaagccataatataagcaaaggacctaatgtagacctgggcaggccctgggcatgctgcttgagtctcagtgagttcatgtgcactttgcttaggttggtttagaggacttattctgctggtgtcttccctccactctgtctcttacactctttctgcctgctcttccatgggaagctttgaggggagggatttgatggagacatcccatggagggttgtgtgtatcaatgtctcttattctctggataatgcctgactgtggggtctctgcattgattcccagctgctggaggaggaagtttctctgataatggctgtacaaggaattgatttattagtatagcaaatatcattaggagtcatttttcactgcattgtttttctctttttagacaagtattatttggttttcctctaggtccctgggctatctactctctggttcttgatcacccaagctgtgtcaggtcattgattccatctcatggagtggacgttaagtcaaatcagttattagttggttactctcacatatctttcaagcagaacacccttgtagatcaaaaggtttgtagctgggttggtgtttctcttttgggtatatgcagagtacctccatataccaaagatgttagcaagtaggggtcaatgctttatgtaggcaccaactcgacatctccatgttcaatgagttgtatgggtgctgtcttcagcaatggggccttattgtcagtttgaagagagcaacctttggccttgacaacagtctgggttgtctggggattcctgtagggcccctttgtacaacaactcaattgaatgtaacccaattctggtgggaagcttcatttggtgacaagaaatggctagatgggactctgtctccctgatatattttgcaatttcatttagattatatgtattaggtttctactgtattaggtttttatactacccctcaaattgcccttaattgtagatgtctctccccatatccccttgcacaactctttctcccctctccctcctcaactgatcccgctgttccagcctcccatccattcataattatttattctatttcccttgcctaaggagatccagcacttcactctagtctaatgtttctcagcatgtgggtcaggaaccctcaggaatttaaaagtccctttcacaaatatgctgcatatcaaatacttacattatgaatcataacagtagcaaaattatagctatggagtagcaaccaaaataactttaagattggggtaccacatgaggaactgtattaaagagaagcagcattgggaaggttgagaagcacaactctagtactttactctatacctaccctttggggttctacagattgtagtttggttatcattgaattaacaatagctatatatcttaagtaaaaattaacaaaagcttttacttaactgactatggcatttatattcaagctgataattaataccttctttgtttttaattttatgttttgctcttgctgtagtattcattgctgatacttctgtattctcctccttgccttttctttataagttatgtttacagattaagatgaaaccattagtgaactgttacaccctttgcctccctgcatcaaccgtatttccttcctagttttcatctctttgatcagagtttcacttgtgatacagaggcaagaccagcgaagcttgtatttctgcttagtttttactctgaagtacactcaattttacttatggctttctcacagttaattctaatatctttttctatgtttttgacttttgaaactactaaggcttgtaatatcaaacagtacattttagaactgtcttattttatctgggttaagatactatcagcaagttttgtttctttttcatttttaattcatggtaagttgactgcatctcttgatgccagtgagaatatattttcctatccagaatatggtaactgcagatggatattaatgcctatttcctatattaatggaaatatcattgagattaggatcattatcaccaaatcaagacagtacttcaacaacaaaacatcatagttcacatgtaaatgggatacacacagagtactcaggcctcctgtcaccacacattatcttttggagatatgtgtttgtcatgaatcattaagcaattaatcaaaacttcataattttaaagttctttggttttgacatcatggaacagtatatataaaatccacacacttttgcttaaggcaaattgctgttgataatgagctctaatcgtgtctttgaatctttgcaggtgatctagctgtgatggttagtttcatgtcagcttgacaaaaaactagagtcattttgtaaaacagaactttaattgagaaaatgtccctaccagactggcccttgatcgtccctgtggagtactttcttgattggtgtttaatgtagagggcccagctcactgtgagcattgccatatctggactagtggtcctggatgctgtaacaaagcaagctgaacaagccatggggaacaagccagtaagcggcactcctctgtgacctgtggaggaaagtgcttattttggcttaacttctacaccacagtctatcattaagtgaaataggagcaggattttaaggctataaccctttcctcaccaggatatttatggtcattgctttatcacaatgatagaaaccctaagacagtagtcttcatgtctgaaggtttacagagtggtcactttttaaaatatctttaatcatcttaacgttgatgtttccttagatggattttccttcactgtcttggccttttcaaccaattgatgcttaacttttctcaaaaggaaagcagtgaacagacccagaaaatgtggcattcccattatacagaagatacacaaaacataattcctaacccaaatgacttccagatttaagctaacttggaatccattcacatgctgagtcaccaagatagtacacaaagctcaaatgagatgaagaatcacagaatgagactatgttctttttagcatcttggaaatttccagaagatgtctcacttttttttcttcttaaaagttaccatgaggagtcagacagaaagaaatgtgagaatgacaattaaactctaattagcaacagcacaaagcaggacaagtgatggaagacttaaccctaaagcttctcatactaggcataaagaagcaaatacaaagacaaagatcattggaggcctcccgagatattttaaggagcaagatgttttaacaaattgaggaactattggggatttgaactgaatttaataatggtttaaatacagaaaacagactcaatgaacaattgaaactgactcatgatatcaaaggctatgaaacacaaaggagaaaaacaaacaactcttgacataatcctacccaataaattctgtgacctgactagagagtatgtaggtgttgagcacagtgaccatcatatgggcacagaggaccctgagaccagtatccaacaccatgggaatcagaatgtcagtgagaaatgtttagagccaagtgggcaagtgtcagtgcccccagcatgggccattgtgttgtagtcaaccaatattcatacatacattaagaagccccaagcaacttcagaaaatagtatgacaagagtcaggaaccacatccaggaataagcaccaacatcactgagtactagaaagaagatccagaattttaacacttctggtggtataaatgagaatcgtccccataggctcatacatttgagtgcctgatcaacaggagtggcaccatttgaaaggattacaagataagatcttgttggagtagatctgaccttgtttgtagaaagtatgtcattagtggtgggcccagtggctttccttgaagcctgtggatccagatgtagaactctgagatgtttctccagcaccatgtcttcctgcaattatggacactgtggcatgtgtcattgacttgtctaagtgtaccttgtttttgaaactgtctgtgactgtgtgtaattctgtatgctattattctcctttaggttcacctgtaatttgagaaatggtgaatgaatataagaaaattgttcttctgacaggactaatgggtatcagtgaccatgattttaaaatggttaagtccttgttgagcaaagaactaaaactaaatagaaaaatgcaagatgattatgacagaattaggattgccgacttgatggaagaaaagttcccaaaagatgctggaatgcaccaactgatagaactgtacaaagagatgccaggacttggagaccttgctgataaactcaaaaaagtgaaggcaaaaggtaatatgggagcagcctggatgcccaccctttcttcaacttctccagctgcacactagctccatgtggtgatcataactgacatcacttttcacagtgtatacctcagcatctaaagaagggcagcatttcagatgtaaaaaaaaaaatcaacagcataaaaatcttccttcttataaagaattctgtgttttgggggttgtctatctttgagggcactggggcaaataaaaatgcagaagctgttgaaagagatgagaccttccactactgtacaaagatgagaaaattataaaataaagattgagataatttttattttaaagtatttaaaccaattagtattaatgctccattaagacactcaacattatctattctacaaaaaaaaaatgttgtggtcaataattaagtgaaagtctacctaccagaggtaagaaatagctatattttatagtcaccgggcttaagaaaaagaaaagaaacatgactaacttggcatagacactcccatctctgatactagcaatcaggagtttgaaaacagggagatgttcagtttaagaccagtctggtctatgtagctaaactctgtacccaaaagaagtgcacaaacaaataactaacaaattaatagataaaaacaaacagaaacaaaaggtaggaagtcaaagcaactatcagcattttgtcatatcacacacatcacaaatcacatcatttccttcaaggattctctgattcagagtggtcttctacagaagatggttggtcactgattatcctcatacaagcatttggaagccacaggtcaacactgtgtgtcttcctctattgctcactatgttgtttctcatcaaaggtctcttattgaacacgaggctctcattttcagctaaatgggcaagctagaatatggctacatctgctgcttagcctgggagttctatatagccattttaacttgtcatcaaatagttgattcaggtctccacacttgcagagcaagggctttacccacagaaacatctccccagacctaaactttaaattctttaaaaacagactgtaggatgagagagttggggcagggcatgactgatggacacaggagtcccaagactgtgtcctctgcacctagagagaacaaggacactcctgaggctgtcctgtacctgacttggtaacatgggtgaccttgtggtcccatcaaacttccaaaacagaggtaggcaattacagcaagacaagcaggagctgagagcaaatagtattgaatgaatgccagttgtctcacaccagtgttcctgagtttactgcattttctcccctgcaccagctaaaaggaaagagacggagaaaagcaacatcccagcaagaagacgcaagagagatgaacccagttcttcccaacctatgtccaccacaaatgaagatttggaaccagaatcaggcaggagtacactgaactcacaggtatggtggttaagctcccagtggaaaatccactaaggttcttcccctttttacattaagtgaatgcttatctgtctagtcataggatcttaaaagtggagatgtggggtaaccagtctcatacttaatggtcattcatgtgtcaggactatctcatactttaacttgtgctgtgtaattctctatgatgggaatgaaaaatcattactcaggcaagtgaggtggctctgcaggcagaggtgcttactgcctcactgatgacccgtgtttgattcccagatcccacatattagaaagagagaactaacagccatgtgatgatgtcttctgaccttcacatggcctcagtggtacataagcccagacaggcacaataaaggaacataaaacaggttaagtcatcgttcttcttatagacattgataaaatggcagtcagtttaaggacatacttttccaaagcctcttaaaggacatcaaacctcaagctggactttctaaacatagacctgctcttctgtcgccacggagatgcacagaaaagtgatgtaaatgaaatttttgttcctgtataagacaatcctacctctgattttctgttcagagaatgctgtccccaacgatgataagttgatgctcttggtgttaaagttattgtgctttatttaacattgaaaaccatgactgggggtttacaataaatctcagtaggagatgagagcttggcatacacaagttagtttccaacagaaaaaggaaaagggaaaatcaactgttatcaagacaaaaagaggtagttcatggaggagtggaaacaaacccacaaaccctgaagactatgattctttcgtatgattaaacattcatcctattatcaaatgcttatgtctaaacctcacttaaaattaatcctttttcttgagaaggtataccatttgaaattattttgatctcaatagactatatgcagtagtttaatttaactacagttgttagatcgtcagttaaaagactttaacctaaatagatgggtccagaaatactgaactgttgttgtaaatgccctgggggcttaccaatccatctcccatgtttgacagactcctcatgcgtctgtatcaatagcatctaacagcctcctgacccctaaggtgccatccattccttcccatattgtccaggttcctcggttttctacaactgcttctaagagggaccaagagagtcaagtgtctccagaaatatcacttagagtccaggcccgccaaatgtctctagcaacagcatccagcagtacccaggcccctggaatgtctccagcaacaagatccagcagtgcccacctccctggtgtgtctctaacaacagcatccagcagtgcccaggtccctggtgcgtctctaacaacagcattcagcagtgcccagaccactggaatgtctccagcaacagtatctagcagtttccaaggccctcgagtgtctgcagcaaaagcattcagcagtgcccaggcccctaaaagaatgtttctagcaagaccagccaaggtaatttcctgttttcactatacaatgatggaggttattacaatcttggactaggtcattaatccctatcctagccttctttctgttgctgtgatgaaacattctgaacaaaagcaacttgggaagggaagagtgtatttaagcttaaagcattcatcattgagggaagccaaggcaggaactcaaggcaggaacctgaaatcaggaactgaaacagagaccatgaaagaatactgcttactggcttgctctccatgacttgctcagcttgctttctcatataatataggaacacctgcctgaggtggcaccacccacagagagctgggcattcccacatctatcattaaaaacaacaacaacaacaaaattgtcctacagaccggaccataagccagtctaatgtctcagtctagattccatctttctggtaatgctagtttgtgtcaagttgacaaaagctaacagcacatgatgtaaaatcagcagtgaacaagaaagaaacctttttcagacaggtgaaaagcaaagactgtcaccacaggatgccctctactcttctctgctcacacaaatgcaaacattcttacacttggatgagtgggaaaaacttttaaaatgtttaacataatatttaatatatgttgagctgacaatcgagcaaccattatctatgtaagtgatttcattatctcaaacaatccatgaagagtttataaagataatcctgtgtgatttgattttagactgtctccagtcttttctggacctgcaaagaatacagaaaacacttgtaattgaacttcctttatttctaaaggtagtgtatgatagttgctccttaagtcctactcacattttctcagctgcggctgtcatattgtgagttactacacaggtgcccttggcttcatttgccaacacttgagaaatgtacatataatctagtacttatgattggtgcaagctgacatccttacctataactccatgtcttccatgaactaagttataccatgccagctattgttcagatttttcccttgctctccccaattaattagctctcttaattgtgccttttttttctgtgtacattctatgcagaaaccaagactgaagactgttcctactcaaccttctgaggtacatggttaccaccacgatcccaaacaagtgatggtgttaaaagcaacagaaccatttacatacagcacaaaaagcgagaaaagtatgttccatgccacagtggccactgagactgaattctttagagtgaaggtgtttgatatttccctgaaggcgaagttcatcaaaagcaatgtcattaccatctcagattatttcggttgcaatgggttcataaatatttacagtgcctccagtgtgtcagaggtaaatgttaaccaatcaatgattatctcaactgcactgatgcaaagagccaatgcaacacctaaaatcaattatctttgctcaaaaagaagaggaatatttgtgaatggaatctttatggtatatgaggtaagccactgaattattctataaaatttcttctgcaatcttagactttcaggcttatcttggcagattataacggttaacttactgcatgccaaactccaaggccttcatgatcattgttggggcatagggtttcctgcctttaagtgtaaaatgcagtctcaatatacttttcagggtaccatgaggaaaactgttttagaaaaagatttgccaagagattctggcattttttcaagcaatgccatctatttgtatcattcatggacagttacatcaatactactatcattaagattttgtttctttgggtttcttcacctgctacatttttgaaaatttgattttgaatgagagttgactgcctaagacaggtactgattataacaaccagaatacgaatcaaatgaactcttctgccccagaatgcactgggttgggaaagcagggttcttcccttctttctacctgttaggaatagaaacagtaaaggaatttctcagcagtagcagagttgatgacattgcctgtgagagtgagggcaagcaaaagcttcattctttctgttccttttctgcctgctggcatcaggtgtggctcagatttaaaatggtctcctaacttcaaatgatctaatcaaggataatcccccacctatgtgtccagatgcttgggtgtttgttgactccagataaggtcaagttgacaagcaagattagctaccacagtctatactaaagcttgaaaaaaggttcacaaacaatgatttgcaacacagagtatctgaagctgtttttcccaactcccccacccgggtctcaacagataactccatttttttcctgtccaagccaaaattctgggaacaccctttgcttctcatagatgtgacagtgtctggccatttctcagaagatgggtattactttcttttgcagaaaaatgtgagtaaggactgcatttgctatgaaattcgagacaatacagggatgatggaggtggtggtctatggacgactgaccagtgttgactgtaacccaagagataaacttaaacttgtgtgctttgaattgacatcaaatgaggataaagtgcagctgagatctactaggcatagtaacatggaggtacgtgctctaggggagcatcctcctctccaagaatcgtgcttttgatattatactaaaacagctgggggtattgcagagataattcaacatgtggaaggaaacaagttttcagttaatatgtgtaaacattcctctccatcctttaaaatatgataattttaatcatagaaaagaatggaaattcagagcacttctcagaagccattatgatattggcagagtatggtggttcatacctttaattccaccactcaggagactgagacagatggatgcatctctgtgagttggaggctagcctggttcacacaatgagttctaaggcagcccagttccaaaacatccagctgttttgtgctgtgttaagtaatgaaagcactgagtttattaaagcagagagattgtccaataagaacatggttttgattaagaaagtttttttcaaattctggctctgtggttttctgaagttcctcatagacaacatagaaataatgcccatcactgaggttcacaagcagaactcacaacaaatatatgcttacaaggatacatggagcaaattagaccacaaagataccagaatcatccatacacttctctctctctctctctctctctctctctctctctctctctctctctctctctcacacacacacacacacacacacatacatcccttcaggattcactgtatattaaagcaagtctaagatagtagtggaaacaaatgaaatataggggctggcctcctgagttcgcaggaccaacgtcaaagttcgaaaccctcttcccagcagctgtaccaggcttttgttttccagtcctcctgccctcctgcccagtgagaacattccacattccactcaacccttgtcatcaagtattgcacttccttctcacccatggctccacaacacctcaggctcttccactttcactcatgctgggaaagagttcatgtggtagtctcaagcaaagatgaaaatctggctgcaggaacagaaaaatcattaaaagaagcagacaatgatgaaagaccagggatggctcttagagacaagacagtcggagtaaagagggaagggtgtggccagctccatcaaaaccgatctgagctgatatcttcacttccttcttcaaggtcatcaaggctaggaactgagaaacaactgctccatcctgcttcagttacaggacttcatgaattctcattgtggagacttggaaacctctgatgtttgtatcgataagatccagttccaactacagaaaaaggccatgcgtataacaaataaaagtcacttctttgctctaggaaatggtgattttaacattagtctttctatactttttgtattttaagtatgtaatttgattttataatgtttatactttgaaagaaaaaaaaactttttaaactgaatcaagtgcttctacaaattcttccatttgttactttctttaaaactgggtctgcacaccaggctgtggtgagatattgtttatgatttcttaaagcttgcctgaggactcagaaagcaaagcagccagccactagctctcacctctagctcagactgaaagggctgatccacatatgagttcttcaccgtgtctcaaactgctgtctcttctcagggtggctggagaacaaatgcctctctgagacgttgtttctgtcttatatacttccctaatgttggcattaaaggtgtgagctataattctcttttagactgattcattcttgtgtagatattagtggccttgaactctcagagatccatttatctcttaatcctgagtccttggattaaaggtgtgtaccacctcctagcttctggctgctgggattaaatgggtatgcctggcttctatgacctatggctgactttgctttctgaatcctcaagctagctttaataaatcataagcaatatctcaccacaccaagccacaactggagggacctcaacacccctccagaaaccccatagcaacaagcccacattttgaccagaacccaggcacatagtatagtttatttgttcttcagttgaactctgctgtagatttgtgtaaaagtacattatttttttgaaaataaaaattcttgtgtcttgtataaaaaaaaaagctgggtgtgtacctgattactcctgttgccatccccactcacatccagacccctcccccatccaccttcgatgtctattctatttcccctcctcagtgagattcatgtgttcccctcttgagccctccttgacgcttggcttctctgggtctgtagattgtagcatggctaccctttagtttacaggtaagacctcttataaataaggacataccatgtttgtctttctgagtctgggttaactcacttaggatgatcttttctagtcccacccatctgccaaaagatttcaggatatcattgtttttaacagctggttaatactctattgtgtaaatggaccattctttgattgagggacttctaggtaatttccagtgtctggctattataaataaagctgctagaaaaatagttgagcaagtgtccttgtggtatagtggagtgtcctctgggtatatgcctctgggtatatgggggaggatggagagaaagacaactggaattgggggatatcgctgatggtttgaaaaaaggagacctcaaaagcagtgaccctattaggaagtatagctttgttagagtaggagtgtgatggggtatgccctgtatgtgaataaacactgattggccagtagttaagcaggaagtataggtggggctaccagaataggaatgctgggaagaggaacacagagggagaatcacaagggggacaacatgtagccaccaaaggagtaacaggtccgggcattctctggtaagacaagcccatttagaaatacttagattaatagaaatggattaataattaagatagagctagccaataagaagcctgagccatcagccaaacagtttataattaatataagcctctgtgtgtttatttggaactgaaaggcaatgggaccaagtaggaagaaactgtctacaggagtgtccttgtaggaggaagtgtgtcactgtggggttaggccttggggtctcctttgcttgagctatgctcactgtaacacacatatcactttctgttgtcttggatcaaaatgtagaactctcagctccttcttcagcgccgtgtttgcctgcttgctgccatgtcccaccatgaggacagtggactaaacctctgaaactataagacaccccaactaaatgttttcctttataagagtttccatggtcacagtgtctcttcacagaaatagacaccctaactaagacacctagtgcaatgtaaactctcaagaatctgtgaggggaagcctacctaagattgagcaatgggggatatggagcctgaaatggccatctcctgttactaggcaagacttccattggaagaactgagataccatgccaacataggcaaaaaccttcaacctacaaattttctggcctacaagatatgttggggtcaagatgaagcagaaattgtgggagtggccaactaataactggtccagcttgagacccataccatgagagggagctcactcctgacactgcctggaaggtcaaaatcaagagacaggacagcccagagacctaggatagaaccaaacatgactgggaaatagaagtcaataaaatggttcctaatgatattcttctatattaatatatttgtgcctagcctaatggtcataagagaggctttacccagcaactgatggaaacaatgcgaagaccaacaagcaaacattaggcagagttcagagaatcctgtgaaagaaagagaaaatggattgtaggatccagagggatcaaggacacctcaagaaaaccaacagaatcaacaaatctgggctcataggccctcatagagactgaaccaacaaccagggagtctgcatgggactgacttaggccctcttcatatatgttacagttgtgtagcttcattttcttttggggctcctaacagtggaggtaggggctgtctctgactttggtgtctgcttttaggactctttccatctgccagattgcctcacccagtctcggcagaagaggaggtgcctagtctcactgcaactagatataacctagctgattggcatccatgggaggcctgcctttttcagaagagaaatggaggattagtgaattgaagggaagggactgggaggagaggaagaaagggaaacttgagtaaggatgtcaaaacaaaaaacaaacaaataaataaaccgataaataaataataaataaagagctgtatttgcagatcagggtagtgtaaatatattacatgaaatacttatgctttgggtgtggtatttaagtacaaagcctcactcataaaggaacagactatgccaccctcagagaaatcaaactatcaataaaaagcagttagaggctgaaatccagcccagaatgcaattgtcaagaccagtgtcctcagaaaggggtgaagtcctttgcacaatttttcatgagtaaattatagagtttagtcatttgaaataagaacttccaaaagtggatgataagagtacattgtgctgttggcagcagtaaggaaatgtcacctccaattacaggatgaaataaggtcatggaaagcttgagaacacaaggcacatgtcctagaccaaagcaaagaaaatgaattaagagactagtcatcagcctcaaggaaggctccctgtattgttggttacctttctccttgctgtgacaatatacctagcaaaagcaactgaaggaaagaaagatttgtttttgctcacagttcaggtgtggaggagagtgaggtggctgatcacttcctgatcggcctcaggaagtggagatccgtatgtgctgctggggagtgctctctctctctctctctctctctctctctctctctctctctctctctctctctctctctctctctctctctgtgtgtgtgtgtgtgtgtgtgtgtgtgtgtgtgtgtgtgtgtgtgtgtgtgcgcgcgcgcgcgtgtcggcttttcaagacagtttctctatgtagctttggagcctatcctagaactcactctgtagaacaggctagcttcaaagtcacagagatctgcctgccgctgcctccagagtgctggaattaaaggaatgtgccaccacccagcctctctttccacagccttttctagtggaatgctaccacccacatttgggctgatttaaaaaataaaaatgccctccaaacatgtccagagtattacctccttggtgattctagatccagttacatttataatcattatcaataatctgggcaatgacctaacatgaaggaaaggaacaaagaaagggtagaaagagcaaatacaaagagataagagctaaagatgaatgtttctgtccccttggaaatttgtggagtaaacattcccctgtccagtgatgttggaaatggagattaatgattatgtttaggtcatgagggtttgatcaattctcataaatgaattaataccactacaaaaatggtcttgagaattgttccctagggttttttgtatcattaccatatatggatgaatcaatcaagcatgggttatagtttaacaacctaagactccacttgacttgggctttccacccacccctcttctaacagtgtattggcagctttagagccttacctgcacatactatgcaagcaaactcctccatgaacaacacaactgtaaagcaattggcaacctagaaccctcaagtgcatcaggcttcagatatatgtgcttcaaacatatattagttactttctaagcaattctttagtgatacacatcccagaacatgttctgaaacaaaaagacctagcctgatccatctagactggtttgggtacttgtacaaagagactaactgtgtcctatttaccatcttatctatatatataattgagtatgcatgaaattttcattagatgtatcaagagaagggacatttgcagtgaataaaatccttttgaacccaagcttgtcaatcaaaatagagaatcacctgtgctgtatcccttggacaaccaacctcctacttctcttgaagtccacaactaattcctagacaataattgttatacttgagtatcttcatttatatgacctgctgttcctcttgacttcctattctttcctaattgaaataccccttagcttttaataaagtttcccatctaatttgaaatctggaggtgccttcactcaaattccttgaataagaggtcaagaatctgaacacactaagctctggtgtcttagggtttccattgctgtgttgaaacaccatgagcaaaagcaaggtataggggaaaaggtttatttagtttacacttccatatctctgttaatggctgaaggtagtcagaacaggaacttacacagggtaagaacctggaagcagaagctgatgcaaatgctgtagaggggtgctgcttactgacttgttcttcatggcttgctcagcctgttttcttgcagaacccaaaaaccagcagccagggattgcaccaagcacaataggctggacctccccatcaatcactaagaaaaagccttacctctagatcttatgggaacattttctaaattaaagctcccttcttacaggtaacaaggactcagcaagaaatctcactaaattcccaaatctttacctctggtttcccagctcccagaactgtgaggaataaatatttgcttcttacaaattacccgatctgtggcaatctcatataaaaatacaagacaaagagagtaggaaagaatgtgttttccacaataggtgtggacagactatagcttggacaaatttgaaattttattcactcttgtgctcttcaactctattccataaagataattacaatgtaggcagaaactggcttatatgcccaaatgtttacataaggactcaaactcttctctttctaaaccaatgccctattattccattcaaagtagagagaaaatccactagaactgctgtggtttcttttgcactactgttaaagtggtaaccatctgcttttggcatggatttgagttccactgcattagatcaaatccatggctggtactttgctcatggccagaacctcatagagcaggaataggctcccaaaaggagactcctacttttgttttgctcaaaggcatattgtcaaactgccataagaatacttatgtttgtttacaaagattagtgctgtcattattattctagtaaataaaagatctttttggagttcttagtagtgttaataaaaaaatttaaaaattgactccaaaggaagcttggggacaatttcataagtgtttcggagaaaaacaatcaagcatgcattctataaatctaggtagctggtagaaggagggaggtggaaaatagaaaaaagatagcaccatgtctttctgatttggggtacaagaaagcactcatgtacagccatggacatcaatcagcaggtggcttcatagcaaaatgggaaacaggcccaagaggaagaacaaaatacccagactgtcttggaaagagtgtgtagactttgggccactgttcaaaataaaaagataaagaggaaaaaggggtgttttataaagtgagaacctagaagaatgggtaggcttcacagtgttacatggtagagttaatataatatatcaggggagggacttcaatatgtacacgtctttcatctcattaaggaaacaatgcatcctgccatcttctttgcacatcttgtgtacaccagatttccctgaggagtgatttcccttgtcaggtaattgataggcactgatgtgtagggtccttatgcccacagatatccagggagaccagaactgttaagcacacagggttgtttctcaaatgcatttaaaacccattcttccattcagattggaggtgtttaatagactagtaatctgtgttatctgttggaccaggccatatcaagctcctacaaccaggaccaaagtggctagtaatctaagtgacccttacatcctggggcttccatgtttccacaatcaggaccagagatggctaatagcccaaatgacttctgcgctatctgtattactgagtctaggccagatacttccctggactttcaaggtaatgcaggtagcctatctccagattccatcttcttgcaagaaatgacatgtactctgtgttgagtttcaaagtaattacacttccttgcccccaaattatactgtgtttaaatgtgttgggggaaaaatgcctggcatcaaacccctggaagtttgatgccagttaaacaaagtcattctgaactgagtattcaatctcacctcttcacatattgctggctgctttgacacctgaagaaatccccacaccagggatggattagtttttgaaggagaaagcaatactgtataatcttctgatctttggagcagatcagaacatcatctcttcactcaggcaaatttttaaccaggaaaaagtggctttcctttagtgaacctctacaaaaccttgagtgttctacctctccatgttctttttgtttgttttttgtttgtttgtttgttgtaaatctgaagacaaaatagttgctttgtcacttttatagggctaccgaagaaatggggcatgggattgaaagctaaccacaaaggaggggtccaacttcaatgaactctaagcctgctactccccatagcaccgatttttaaccttggtgttctaggctcttctctattgttgtgataaagcactctgaccaaaggcaacttgggaaagaaagggtctactggtttacactttcagggtacaattcatcactgaggaaagttgggccaagaatttaaggcaagcactccaagaagaaacaacaacaaaatgttgatcactgctatctctcttgcttgctcccttgctcatgtttagctaaacagtgtttgtacaacctaggaccatatgccttagaaatggtgctacctactgggttaatcctgtcacatcaattaataatcatggtgatctctcacagacatgcccacagaacaacctagtgtaggcaattcctcaagtgaagcttctcctctaaaatgattctaggctccatgcctcaggattacaacagctccaaattcttacactcttcacagaaaagcaccacaaaacaagtattaattcagcccgtgatcttaacccaaactcaaggtttttccactgtcttcaaggccccaatgcactctgtggctacccataaataaagcagaaacactgaagaagcattagctttgtcattgaaggaaagcagcttaattctagaaccaggagggagggcaatgccaaattgctttctatttatttgagtttggagcttggagttgctggtttgtaccgacattatgttctgcaagtccaggccttgggaaccaccaatgaatgagtggatgctacagaatgacttaaaccaagagctaactcatctcagattttctctgaaatctcttcaaggacagctcgaaagtgacacagccaagttctcctgccactgctgcctgcatcctgagcatgatagacagtggctgggtgacttggacttttgatctgaggtttcatcacattcaaagaaatgtagattcctagggactcactggtaagtttgtgagacctggagactgtaaatttaaatcttgtacctatgaagattttgaagaaaaatcccaggtgtaataactctttgacttttttggtaattaagtgtttacagaaaaaaaaaactcttgagtttcactgtctgaggaaatcgaaagctatgaacatcggtgaggggctatctcattgtttttatcactcctctaaccacaaaaaagcacaggataagacacccagtacagctcagtctgtgcatcgaatctaaccagtgtcagtttgcttattctctctgtaaatattttggttcattggcatttcaggagattacaaaatcctctgggtcactttccaagagctatactttttattattttaacatctgacatctctctctctctctctctctctctctctctctctctctctctctctccctccctccctcctctctctcttctctctctctctctctctctctctcatcacacacacacacacacagagagagagagagagagagagagagagagagagagagagagagagagagagaattacatcctatgctgcaaatgcaaaatctggacacctggacaccactgaagaaatttctaacgaggtgagtccttccctgatttctggggagattagatactctgtgaaatgcacaagagtacaggtgaatccttgtggaacttttggttgagagagaagaaagcagagctggtggctattgcagtcagcaatgaatccacagtagctgggatcaaaaggtccagtcagaaagatggcagacatcattatccctccagcacagagaactgcgccatgagaaatgcatttcacatatttcagattaccaaacaaactttttagagataagtctgaataggcgaataataaggagaaggctttggatacctcggctagggcacacttagaacctggtgactgtggtgagtgactgagtacagacgaattagtggcatgaaaaatgaccatgaaataacattcagtgaaaaatgcatcgggccatcaagctgtatcatctagtatcccaatagtaaacagcatgaggaccaatgggcgtatgtggtagaaaatgtctcggatttatagctattataaacactgatttgatgatttcataagcacatttaatattcttcatccacttccacattttgtaggaaaagtggtatttaaacattgttggtctttgacattctgaaatataatggttttgtttgtttctttcatagtttttgtttgtttgttttctggtggtaagatgtaggaaagaggtggatatttatttagaaatagatgtatactatatacttttagaatattgtgaagactctatgcactgtgatatgtccatcacgtttactcttacagaagtttttaaatgttggtttcagaactgtatgtatattaaatcaatattgtctaagcctttacaaaagttatgatcttgttcattcagtaattgaggtatacactcctaaataaaacgtgaaaatttgattttatagctattattaggtaactctattattaaaactgctatctatttctaggaggtaaactataatcattttattgttttttatacaaatttttatcttcacttctaactaagacaatcctaatatagaaaatgagctttcattagttaatatgcagatgatttattttaaaatttccacctttaatgaatgtcttattaataacatttaactacatatgtcaaataaaatttgacaaatgatgttaattaacagattatgctaggtcctttgagtaggttggtaacacatttttctggcttctattatggccatttttttatggtatgtctatactgccctccttgccttctctttatgacttgcaactgacaattgaagataaaagcactggtgagcttaaaatcttgcctccctcagtgaccctgttgatatacttcctgtctcttctctttctgagaagggtttcacacctggagcagaggcacacccaggaaactttggttttcattctgcttaggttttactctgaggcatactctgggctggtaatcctgttcaaaaaagttaatagtcatagaatatttagcattctggttagaatatcacacacatgcacacacataacccataactaaaattacttataaatttaagcagatattagaatccatcccctagaattataaaggatgtacagaaattcctaatcatatctagaagaggacattttgttcattgggagttagcaatttggagagtttccagaaggcaaaatctcagttgattcctaacagttgtcatagaaggcattcagagaaggtggggtgagaatggcaatgaaaaagacagcgtctatctcacaaagcttggcaagggaaggggtgttgtgtattctgaagtgtgtggtatcaagaatataactgaaaaatacgtgaaaggtgcagattaaccaatacattccaatatattttaggaagcaaggaatatttttaaaaaactgatgagctatgaaattactttagcagggcttaaacatggcctgtacagagaaaattggcactatgggctgagaaaacaaactaagaaaatcaagcataaaggtggaaaaccagatagctattgaaataatttcacccagtaaatgttgtcatcagagagtactgtgggcacaaagacctaaagaacaaggtctaacctcaggagaaacaggatgccaatggaagctgtttaatgaagtgccaagtgcatcaggaccaatgccccaggaaaggtcaccccattgaagtcaacactcattcctgtacatggagagaaggtgcagcctgtttacaaacaggccacttaagcaagccaggaacatgttccagcccaataaagaatggaaaacggtccaacatcagatatacataatggaaaaagaatccaggatttcaacctcatagcccatactctaaatgctgtaacaaccactgacttccatgttttcttctatcacaatcatcactgacctaagacagctattatcatcaatggggaagaatttcttagacttacttattaactgggcagttttctggtcatttttcacagtgccataattagtaatcaattctccttttctcacacccacagctatggacaacactgtggcatggttgttcactcacctagacacaccctgtttttgaaattatctatttatatgtgtaattctgtatactgtttttctcttgtaggcttacccataatttgagagatggtgaacgaatacaagaaaattgttcttctttcaggattacagtctatcagtgactaccatttcagagtacttaagtctttactgacccctgacctacaactgaataagaaaatgcaagatgattatgatagaattaagattgctgacttaatggaagaaaagttccaaagtgatgctggattgagcatactgatagaactgttccaaaatattccagaacttggagaccttgttcatacacttagaaagcagatggaaaaaggtaatacgggagcagcctggatgtccactctttatctaccctccccaaccttgctatctccttgcagtgtttatggctggtatgcctcttccccagtgtatgcattgggacctatagaatggcagcatttcagatcttaacaagttgttggaaacttaggcaactcctttcctacaaagaattctagtgtatttggtggtagatgtctttggggtgggtgaagaaagaaaaacaacaaaacagaagttgctcagagaaacaagagcttctaataaagtggaatggatagaaaattataaagcaaaattttaatacacaattaaaaatacttaggtcaattaacacaattctaagttaaggtataccatcattaatatattttatagcaacaagtgtgagtcattatttaagtagaatccagaatctaagagatgtgaagaagttcccctttataacattactgggttcaaaatacatgaaagagagagagagagagagagagagagagagagagagagagagagagtgggcatgttgtcccacactgtgatcttagcatttggttggaacagagacatctccagtttaagactagcctggggtttatgctgagctcttacatcagaaaataaaagggacccaaaagacaagcaatcaaagttcactattaatccattgtcatatctcagattaggtcacaatttcttcctctgtttctctaatttggggtgacctgcagaagataatttggcatatcatcatgcaaattttagatttcttttttcaaaatacatttatttatttgtgtatgtatttatcttacatcccagccacagtttctcctcccagtcccttccctacccaattccccctctgttcccaccccacaatggcaggtctcccatgagtatcagcaaaacatgacctatcaagtagcggtaagactaagcacctacccatgtattaaggctggacaagaagactcagtatgaagaatagagttccaaacgcctgtaaaagggccagagacagtccctgtttccactgttagaaatcccacaagagtaccaagctacacaactgtaacttatatgcagagtgcctaggtcagtcccatgagggctccttggttgttggttcagtctctgtgagcccctatgagcccaggttagttgcttctgtgggttttcttggggtgtccttgacccctctggttcctgcagtcctttcttcttcgggattcccagagctcagcctaatgtttggttgtgggtctgcatctgtttccatcagttactggatgaagcctctctgatgactgggttaggcaacaatctagtcacaggagatgttcaggctgcatatctgctattgctaggagtcttagctcgggacatccttgtagattcccttgctccagctttttacctgatcccaaaatactccccctttccagaagtttcttttagttctcttcccctctacccccccccccggctgcaattagatcactcatgttccaatctccacctgctctcattctatccccaagtctcttctatttccccttcccagggagacttgggtgtccgcccatgaaagtatactgagatataagcaagaggcaaaatagcactggatggactccagctgtcttactacagtacaacctcattcagtttatcatcttttctttatttcatcagtgaaaaataaaaaccaaagaaaagtcaaacatgtttcaaaaagacccaagcatgatgaatcctgtacttctcaccttagctccaacacaaaggaagctttgaaattagaaccaactatgaagacgccttcattagaggtatgttgtctaagatctcactaagctggctctcctcagtacctttctctgagtacttaatctaagcttctttatctgtgcaaaggcttagcaaaatgaagaatcaacaaattcatgattactggtcactcattttgttaggagtacaagactattttattacaatataatttcctgaatcaaaaatataaaatcattacttactttgtgaatgtggtgtgtgtgtgtgtgtgtgtgtgtgtgtgtggtttacatacatgtgtgcgtggtttatatacatgagtgtgtatgcatttgttgatagcaaaggaggacttcaagtgttttgtgtgtgtgtgcatgtgtggtttacatatttgtatggctgtgtggtttgcatacatgtgtgtatgcatttgttgatagcaaaggaggacttcaagtactctgcttaactcccccctcctttttcctttgagacagagtctctccctgaacctggggctatgctggtagacagcaagtctcagagatcatcctactctgggctttcaggcaaacatatgaaaagctcagatttttctatggtttctgggatgcaatcttaggtcctcatctatgcgtagcaattactcttgtcccctgagtcatctcttcagaccctccttactacctttaaaaatattttcagaagtagcagtcagtttaaatgatatgacatcccaaagcctgttaaagggcatcaaacatcaacttgtactttctaaatctaagcctagacttctcccatcatcaaatgtgattaaaggactgacataaatgaaatgtttctattcctgtaggagatgatcctatgctcttctctggccatttgttcagagtattcagttccaaatgaatcaacagaatcagaacccaataacacagagtttattatctttgtattaaaatcattgttcttcaaacaatgttaaaagaccgtagtatggggtggggataaaactccatagtggaacccagctttgctcacatgagaccccaagttcaatcttaacacacaaaaaagaaaaatcagtccttacctgtagaaaacacatgcatttttttctttgagaaaagggagataaaactacagaaactgaagtctccacaactccaccatataataaagtcagtcattacattatcaaatgtttctattaacccttcctctcctgtcctgtatatgttgttatgaaataatttatgatctcaacaaactatagtagcttcatttattcagcgttatcacatagtactgatagattatttgaaacatgttctctttacatatatttaaatgagttttgattgggtttcctgtgtattaggcaaacattctaccagttgagccacaacatgattaaaaattattaaatctatgctccattcttccaagataccccgtacgtcttcacaatggtaaaaatctaacttacttatttaatgtaaatattcatccctctagtgtacattgtgaaaccctgacagctgtttacaaatgtttatttattttattgcattctaccactacaccaggaatctctttacaatcaatgttttgtcattttaatttttagggttgggttacttggaatgttaaataaatgtgcacatttaattttctgtcagcatcaatgatgatagtaatataattaaaatatatataaccctggagaaaaggccattaataatcatttttgcttggatgatatcagcttgaatgacatcatctatcttttttctttttggagcaaacacttcttaatgaatacattttacaaatacaccagagaatcatgcaatgttgccttcattggatgtgattctgggtgaaaagcctgcacactcctttacaactagaattgcagaacctttcattttctctttattgtttattatgactcagacattatcttcaaaatgaagaaagcccccatctttctttgctatggctttcattgttgaaataccaacaatgaatctttttctttcttctggctgcagaagacttacattctaagggatcagaaacacaaagaaaacaggaataattgacatgtagtcatatgaaagtttttacacactttcaatgttttacgttttacctttgaagctaaattatgatcttttaaggcttatgcctcatataagttttaggtaagtgtattaaaggcactaaactatgtatggctttatatacaaatgtttcaaatatatgtgtatatattcatatatacagtagtttcatttaaccaaatataaaatgagtatttaaaagatcttaacctaagcagatatttaaacgagctctacctagtgcatactaggaaaacactatatcagctgagctacacctcatctcccaaaatcttacctctgtggtccattatttcagggtacttgttgcacatttaaaatcatatcacctgaaagggtactggcagggattcctgtgtaccaacaaagcagacaatctggagtgatttcattacaaagctgagggaagaaaaattcataagtgaagtcaatcttgtccatacaacaaccctgagtcaaatcggaccagggtacctttgacctgttttataagacatgcagagttgagattctaagctaaaccggtgatttagtggccaaatttctaagagacattctgattagcacgggaagaggctagatgctgggggtctctaagatatgttatctataatactcccacagcccctggagggggagaaggctaacaaaacagaagtatttttaaatggggaaaatgtatttgaagatgtatttgatctgatttttaaaaaccatttatcgggacacaaagaattttaaacatctatttcccttcagaaacatagagacacaatcaccaaatcacctgacatcgtaacagcacagtcactccagggaaagcataaacttccagagctttcagcaaccaacagatgccaggctgtgagagagccacagactcctcgggggcttccaacaacagcctccagcagcctgcaaactcccccagagccttcaacatctcggggtccttcagcaccattttctaccagtggccagacttctcaggtgtctccagtgactgcctccagcagtatccacactgctcaggtaacttcaacacgttcatatagtcaccaagatcctctgaaatctccaaaaacagcgtccagcagtgtcccagcccttcaagcaagcccagcgacagtgaccagcaatgcccacaccctttcgacacctcaagcagcagggtacagaagtttccaggcttcccggatgactccagcaacaatgaccagtggttataagagtccctgggtgtctgcaccaacagtgtctggcagttacaatacccctcaggacaccccagcaacaatgcctagcagttttaagtctcctctacagtctgcagcgacacagcccagcagcagtagtactcctcagtggtgttcagcgaaagtaccgggcagttcctctgctactttgctgttttcagcaataccactcaaggtaatgataggctgtcctcataaataaaatggcaatgggaatgaaaacagagaatttcccttgagccccctatgatatatgatgttttattttaatgagacacttgtctgttttatcatatgatttgaggtccttccctaaattcattttgtactgctcttatgcttggctcctttaagaaaacgtatgaatcagtgagcacctgagcatccctgttccttaaagggtacaattacttttttttttttttacttcttgttgttttggctttcatccacattttttcacttggtggaccataaatgtgatattttagtggaaaacatgatgtagaatataaaggtaagcagaatatatcgccaatgatttctttttcatcttttaattataccaatatcattttagaaaacttaggaaagtagataatacacaaaaataagtaagttttaaactatctggaatctctttagaaaatgccacatttcactatccagtcttgtttatcttttgctatatataagaagagtgtcctttaccagatttgcactacaatgcacatatctttctatagcgtacgattttaattttttatttaagcaggcttgagagatggcttagtggataaaagcacttgccacataagcctgacagcctgaacttgaatcaccagggcctttgtaagatctggacacagtaacatctgtttgtataaagcccttgtgttccaaagcagagactgaaggcagtgacaggagaatctacagaaactcataggccggcttgttaggtactcccagcagtgagctagagagaccctgtctcagacaaagtagatggtaagaaccagcatctaatgttgtcctgtggtcacacacacacatacacacatacacacacacacacacacacacacacacacacacacacacacacacacacacacacacttctaccccaacacacacagtcacaaaatattttttaaaatagttaacatatcttgaactgccattcaaccattacagatttagatgattttatcatctgaaacattgcaaagttcatacattataaagataaagctatgtggtttgacattaggctctttccagtacttttttattcctgcaaacactgaaaacacctgagaacctttttttcatttctaaagaagtatacagcatcttctccttaagtcccatgcgcctctgtccagtgttctttacaccatcctgaggtactgcttaagtcacattgggagtgaacttcttaaggttagaaaccattggagcacattgttgagtacggacttctgaatcagatcagcaagtgctgtgggttcatagctatccccctacagtggtctctaggtttcctgtcattgccaccatacttctccatttcaaagtatgctgttgaaatcagaaataataagaagtatctagatatggtggcatacacctataattccagaaaagaatggtggacctctgtgagttcaaggccacacaccctgatctacacagcaactacagagacagccaataatacatatggagaccttgtctcaaagaagcaaagaaagggagaaaaggaaggaaagatagagggaagaaggaagagagagtggggagggagggagggagggagaaagagagagagagagagagagagagagagagagagagagagagagagagagagagaaaagtattttgcagggtgccaagtactggggagacagacaggttggacaggttgtcaaataactgttcttccttccttttccaggtccagggttctcctccagggctgctcttatgcaagtggaagagcttctagtctcaattattcagattatcagagtcctggggtgcttacactgtctgtctgtctacctaagcctattttacaagacggtactggtgtgtgtgtgtgtgtgtgtgtgtgtgtgtgtgtgtgtgtgtgtgtgtgtgtgtatgaaaagatttgtaacttaagtttttaaaacgtgctgttagattcacgatgtagctcacaggaaaagaatctgtctggcattcaggaggccttgagtgcattcccaaacaccataaaatattaatacaacctatttacctacagtgagtaattagtacatgctggagttactgcccagatccccatttatttcctatcacttatgtcaaatcacatcaggaattggttagattttttccactctatctaataaaaatattccttagtgtctatcttaactgtgcctggttttcctgtgtacattccatgcagaaaccaagactgaaaactataccaaagcgaccttctgaggaagatggacaccaggaaggtcccaaacaagtgatggtattaaaagcaacagaaccatttacatacgacatgagagaagacaaaactatgttccatgccacagtggccacggagactgaattcttcagagtgaaggtttttgacaaagtcctaaaggaaaagttcatcatcaacaatgtcattgtcatctcagattatattggccgcaatggttttctagaaatacacagcgcctccagtgtatcagaggtgaatggcaaaactgtgatgaatatcccaccttcactgagacagagagccaacgcaactcctaaaattaataccatttgtacacaaagagtaggaacatttgtgaatggagtattcgcagtatatagggtaagactttgccttattttgtaaactttcatttgcaacctgagattttacatcttaacttggcagtttggtctattttctgtacacaagaaaccaaggcctccctggtcaggaagaggaaagtggagcttaccactttaaggtgtgggatagtctcttcacattgttctcatggtatcgccacgaaaatgttttacaaagagactccacacaaaacccagcattttactatgatgatccatttatagtatttcgtatcaatacagagctttaagatcttgtttgtttgcatccttacctacacatatcagtagtaacttaattaataggtgaagcccttgccgggataattgttgtgacaaatagaataagaaagcaagttgctatggtgggtgccttgctcagcctcaatgcaggggggaggggcttggtcgtacctcaactgaatgtgccaggctttgttgactccccatggataccttatcctttctgaggagtgggtgggaagtggtttgggaaaggttgggaggagcataagtaggggagggggaactgtagttggtatgtaaaatgaatttgtgtgtgtgtgtgtgtgtgtgtgtgtgtgtatgtgtgtagcaagttgctaacatcctggtcacttcatctttaaactgttctcaattccattcaacttacttatagctttatgaattcttagagaattttatacaaagtatcttgatcacattccccctgatgcttctctaagctccttctaataccattttccccactctgcttcacatcctcttctcatttcattttttagaagaacctatcttgaatcaagtatcctgactctttggttcttacattcttcctgtcccctcttctgtgataattcctgagcctagagtgcatagattatgttaaaaacatattaattggaggaggacaccccatggtcatttgatctctgcattttgacagttgtggccttctgtaatggtctttatctgctgcacaaagaagcttctttgttgggaggggaactctgggagggtcacctgcctgtacctgtaagtgttgtaattttaaaagtggcatgagaaagatgccatgagacagggttcatgtggaggggattttattagagaaagggatcataaaaaatgggtaagggagggggaagactggcctccagagacaggatcaggagagaggagagagagagagagagagagagagagagagagagagagatagagagagagagagagagagagagagagagatgaagatgggaggtagtcaggtcccttttcaaagggaacatagtgaatgtgcacaggtggtgctcttagtggctgcagctgagggtgtatcctgtcagaaccccaaggacagacctgaatactaacaataagtatttagaatgtagttagaaattacactggttcaggaaagtggagggggctcttcctctagattccatgtcccaatgatttatggtgctgcattcatattccttcctaatgagtggaccttatatccaataaagtaacagttggttacttccaggatgtaagtgccactatttcacctttcagaacatcttaccatgctgatcatcattgtggttcattgtcattatacctgggatagggctattcattgctctttggcttcttctgaaactataagaataagtcatcagtgaggaggcttctggataatatagttagttcctccaaattctgtgtctcagctatgtgataccttcagcaagagggtcttacattatttgcctggcaggagcctatattgttatggggtctgttgcattgccctgattaacaagctgaaaggaaatttcccatgcctggcactgtagtttttgttagaaggtctaggaggtttttgtttgtttgtttttgggtgggaaggttgtcataccaattgccataacctcaatcaaactatatgtaagtgtgcatatgtgtgtgtttgtgtgatgttatatgtaatttaagttaaaacaacataatatatccccctatggcttttccatacatcaatgttaattgtgtctcctccttccatccccctctgtgttgtcatttcttctcccttcccaggtgagtgtcccacagtcattttcccccatttctcccttcatagataccatgccctactattctcatccttaatatttctgttatggtccacttttacttttctgggatctgcatttactctaggttatttacttgcaccaaaaaatttggagctagcatccacaaataagagaaaacatatacatttgtgcagagggcacaaggtccttttgcttacagataatcactagggaaaccaggaagtttaaacactcagggttgtctcttcaaaagaagaggtgtttaacctgttttctgcccagaagtctggaagtaggtatggttaatagcctggtgacctctgtgctgttcgtaggaccaggccacgcctggcacccacaaactcttacatttatctcagtcattctccctagacccttttcttgagcactgtttctcagtcaatagaacccgtctttatggaaggggtcatatgtactttgtaaaaagtttcaatgtaaacatgtcttaagtgtttttgtatacacaggattgagttaatggtcatcagaaatttttttccagaattgtacaatgcttaaatacacttgaaataaactgccaagtgtcagattttagaagtttgaaacaacacctgctactgagcagggttgaacctgattttcttcctgtcgcatatggatcaacactgctagccctggtgtctggagagacactccacatatttgtcttcctgcatctgtgttgcatgactcacattttctagttccatgcatttgcctgcaattttcattttttacagctaaatagtattccaatttagatatgcatcacatttccattatccatttctcagctgaaagacatttagattgtcatcatctcctagcgattgtaaataaatcatcattgaacatgtctgaacaggtatttatggagtagggtatcaattcctttggacatatgccaagcaatggtataattggttatatgaaagatgcattttagctttgagggaaatctccacactgatttccagagtgcttgtactagtttgcaatctagccaacagtgaatagggattcccctttccccacagtcatcatatcagaatcatctggccagtgttttcttgattttagccattctgactggacttagattcatcaagtgattgttaagcaagtggcctctatgttattttttttttttttttttttttggtttttcgagtcagagtttctctgtgtagctttggagcctatcctggcattcactctggagatagactggcctcgaacttacagagatccacctgcctctgcctcctgagtactgggattaaaggcgtgagccgccaacgcccggctatattaattcttaaggaaacaaatataacagtttctctctcaagctgtgacagggcacagtgaaatagaggagactgaggatttcttgaacttaagttgtggtgtctttcagtgccaatttcccagtaaatagcacacctagatgacctaatacttgttcaaagtatggtgtcatattatgttgtacatattcagcaatggcatctggcttttatccctggtgttctctgcagtttgtctaagtgactgtgcaagtacatctggctatagccgtaacaaagaaaacaaaacacaagtaaggaaagcagaactagatggtgcagatttaatatttgaaatacttggaacagagaatacatgtgtgcactgagaaagtatcatccatttcattgcgacttatatagtctcagactcacaaggagccaaaagccacccttcttagttcttgaagtaatatcgaagacacccacaatggcaatcagttttattcttatttttccctacttgggctccttacctctcatctctacaatatggtagaaggaaagtttttctctaataacccatcagataaagaccttaaataaaagcttgggagacattttctggtttgtgaatgagaacccctgaagttgtcttatacccataattctaaattgggcctgtatttgtcttatcagggacaagctaacagtatttatgtctcatagatgtaacaatactttacacatttctcagacgatgaatgttaatcatttcttttgcagaaaacagtgaagaatgaattcatttactatggaatagaagataaaacagggaagatggaagtagtggtacacggacaatttaccaatatgtactgtgagccaggggataaacttagactcttctgctttgaattgagcacaagtatggataagtggcagctgagatccgggagacacagttacttgcaggtgtgtggcctaaggaattgtcattcttcctagtaaacccttttaatactctgctaagacttggttgcaacagaaagtagattcagttttagacattaatatatgtaaacattttcttaccatcattttcaaaatggggttattttgctttgctttgcttcttcttgcttttgttttcttaaaaatattttttcatagaatatgttcttaacgcagtttctccttccttatctcctcccagatccttccccaccttcccatccatccaactccatccctcttttctctctttatctttaggaaacaaacgtgtaaaacaaactaaccagaataaacaaaaaggaaaagcaggagcaacacacacacacacacacacacacacacacacacacacacacacacactagaaacaagagatcagaaaccataatatacaaggaaaataccattagcaaaaaaatgttcaaagcattattagcaagaacagcaacaacatttcccaaactaccattgaatccattttgagttagccatcaacttttaagtatggtttgtatacccagtgagattccattagaggaaactaatttttcctttgcaagcatctctccattagaaatagtttttttggttaaggatgggaacttggatccactttcctctcacagcgttggggcccctcctgagtcggacttgtgagtgccctgtgcattctgccacagtctgtgtgagctcgaatgtggatcctgctatgtttagaaggccttgtttccttgttgtctttcataactctgctcttacagtctttctgcctcctcttccacatagtctcctgagctccaggggaagtggaggagtggggcactgatgaaagcatcccatttagcacagaatgttccaaagtctctcattacctgcatattgtctggatttgggtctctgaattagtttccacttactgcaggaggaagcttctctagtgatggctgagtgagacactgatctaataggtatagtagaacggcactaagagtcattttattgctatgtaattttagcagacctatacttgattttcccctcaaatacaacttggaaataatgttcatcataaaggatcatgaacagaactcacaacaaaaccatatgtttcacaaggatgccttaagcaaattagagcacaaagaaccaaagtccaggctcttgtcacatgatgggattcactaaacactgccaaagactagcaataatgcataggtgaaatataagggctgacctgttgagtcacagggaaatgctttcagatctcccttattctcaagactataagtcaaacattccaaattcccctcaaacccctgcagctgcttaaggcatgccttctgtaccaccctattaaccatctgtgcaacagtatcttccacttgggtactgctgtttctccatccctaccattgctccgccatatctcctgctcttctgtctgtgctgacgcctggtagggtgtgactagctcactttatgctctcaagcactgggagcaacactgattactaggctcaagattcagtaaaggagctaggtaaggaaagagaagtggctcacagagacagtgtggggacagtgtgtgtaaacaggtgtgtggcaagttgcttctcagctgatctgacttcattcttttcttcttccaggtcatccaggctaggatgagagacctggaaccacccaatccttactcacttatggaaaatccctacactccaatttaaggacaactgaacaacattggcaatgatgtttatggtaataagattcagctacagaaaaaaatatatgcagcacatagtgaaaaatatgtataaaatatggctcttaattctagagaatagtactctttgactttgttctttatacattttaggttctctgcatttcatattctccacatgcatgtttcaaagcttgagaaaagaataataaacattttatctaaagcagttcttccccaggagtctctttcatctgtttataagttatgaagtatatagcctgtgctgtgcagatcagagtgaaacacaccgaccgggcttgagaaatatgtcaacttgtactttgggtgagatagccaaggacagaggcctcttcttgaagggtcaggctgtgttctatgcagagaaaccaagttaaaagtagggtctggagtgcagtctgtactgtagttaccaaggcttatgctccaaggaggagtttcactggctaaggaagaaatactgattattttaccaaatgaggattctctggtggtttcatgaaggcactagtatgctagaactgtcagccctgtgaagcagactatctgagtctactcctttactcatatcccagggttcgtcagtagctctcccatctaagttcctgctttacacttgcatgtaaagtacaagttgacaagtagagctattgggagttattccaagcaaagacttatatcaggcagatattgaaggcaactaacttacttttgggtagaaaggcagagaactgggatgtgtgtattagtggtaaaagtgtgaataccctgggggcagaaagagaaagttcactactctaagttccaaggctattcatttccaactgacatatgggaaagaatcactgaagttctaccattatgtactgtgtccaaagatccaagaatcacaaggtcctgcttcactttcaatttttcactctctgattatgtgtcatatcctacatttagatgacagttagatattatatatccttgcataatattatgctaatagcatatacatgtgtatgcatttatatttacacacagacattagttatttacatatgtacattagtatagttatatgagtgcctagtatatgtatgtttatatatttacttatttataaaaatcagtttagtcatcataacccttgatcacagaatatcattttctatgctaccataaatgatccaatgaagtggtcaaaattataagattactctgctggctaggaaccaatttcaggatacataaagaaggccagcacactctaatcaaggaagcaattagtcagcaagatactactaaacatctatgtgccaaattctggctcacccaaatttacaaaaagcatgctactggacttcaagacacaaattaaccccacctcagtaagagcagatggattcaccacaccactttgaccaatagacagggcactgggacaaaaaaagtagagaaacttcagaattaaatggcattatgcatcaagtagatctaacagatatttgcagaatattgcacctgaactgaacataatttctactcagcagcccagggaagcttgtctaaaaaatgaccacataaatgggtacaaaacagatcctaacacctatagcttatgtaaactgcattttagagtcatagagaagaaattttgcctaaatacaagccatggggaatccagtcgaatattttaaagctccagatttttacaactgagccaatttttgttttttagttaattttgtgagttatgaattgggtccattatttttaacatggatatctaattgttttagtagtatttacagaaaaaataccctttctatattttcatttgtgtttatacttttatggaaaaaaacagtatattgtagacaagtgagggctgttgccttcctgtattctattggcttattctgaccttaaaatcacaatgtcattgtattatttacatatctctaaaatattttaattatttcactaggacacacaatatctacctttaattacacaaaatatatttcaaaaatattacactgctttatatgctgtgttaagaccttgcaaccagtattacactcttaacttttccctctcatattttgtatttgttcctatatacttcactttcaaatattttataaacattcatagtatctttgcttaagatcaggaattggcaaagttggtctcttgcctgtttttatatagattagctctttttaatagccaacaaactaaacgtatcttttacatttttttagatgttcagggaaaaaatccaaaggataatattgtgtggctgaggacaactatatgaatttcaagtttctgtgtgtataagtaaggttgtgttagaatacagattcatttatttgtatttttaggactattgccaaggaaaagctaactaactgtagcaggggccatatggagcaaatagttcagtatatgtgtgtccctggaaagccaagctccggctcttacaacctacagaaggaccagtcttctacagatcagcgagactgggaacaagacgcagagtcagcaagaaaaacacacagacttcttttctgagggataaaagtttctacttctttattttttgaaaaccctttttatattccccacactaagtcaattacaaagagaaggatgtttcttataaacaaaagttacacagttactatataatcgcctaaaaaatgtattttttctggaacaggtcaactccattgtatttcttaaccacatctttatgcatttcctgagaaacccacactcagtcaaacacttatcttttagacttctcacagacaggagcccttcagccacaaccatttacataggcagtagctcttacaattgccaaaaaataggtcacttgtttaactttcatattttagaggcctatataattatcttaactaaccatccaattctttgttttttagttacatgaagtcattatttaaagctttctttttagctatgttgtacactgaaacccatgaacacattgcccaacatcaagatttataaaacaaaataaaacaaacaaacaaaaaaaattgagctagcttaactcttgggactccattgtttttcttaatctttaacctaaaccacagtctatatgactcatcaagtgaaatttataaatcttagttgtgtgacacttcctattttctattccctgcagcccctgctttatcaggggcaggagcaacactatatcctacttttacctatattaattttcccactaaactatctatataatctctaaagctatataatccattgctgtatttgttagaaacctttaatcacccaaattctatttaaaccaacactgtattgtatacaaagattaattaggttaattacttcattacttaaataaagcttaagaagaaatcatcttggtaacaatatgcaggtaaaaatgcccaatccaatgggtatttctgtgagatgatcacactgcattaaaggcagtggggacccacacacacccattcaccaaagaaaaatggcaggggcaaacatgtaaagacacagcagtagcaagaaacattatggatccagagcccttgatgccatgcctcacccatcagttccttgcattgtggtgagccgaatgcctgaaaatcgagtgccacctgatgctctttctgacacggccaccagtgacaagctttctgtctcctcttttagaatgttccctgaattttagatgcaagagttctgttgtagatatgtccactagagctgggatacacaacgctatatcttgctggttgtgattttctgcgatgtctctatctattgcaaggagaaattttcttcatgggagataaggactacacttatatatgtatataaggacaaatacctagagtgcagttagggattatgctggtttagtaaagtggtggtaataggttctcctttaaaatcagttcactagtccgggggagctggctaggtttcaggagtgatttctttcttgttgagtgggtcttaagtccaactaaagaattgttggttaccactaaggtattcatgacactaattcacccttaaggttattttgccatggtggtcatttttttatggttcttaggcatcacagctgggtattactgatggttgcttccctcttttggaagcttgtatggcaccttctgtgatcatgaaagataatcaatacttgggtagaagattgtcaggtcagttaaagctcaagcctctgaatctcatgtctgaagtacatggtatcttcagcaatataaacttatcatcacctctgggggacaatagcaatagaatagcctgtaatgtttggggagtctcttagacaaccctgaccaactactcataagagggtttctcatgcctggtgttgggattttattagatttttgtatttgtattgttttgctatacatctgacagagtatttttgtagtatttatcctttttgaactaacaggataagatgatgaggctgtaaactgctctcctcaggcaactcaatctggttcaagaagcagtattaaaattcttcaacaaaatgccttttagatgagttgacttcaatgcacacttttcttctcattttttcggctttgtggccttaataacctaggtggagaaaaagatgtagactgagatgtcattgataaattaagtcttctctacttccagttcctgtgttctggaatgtacctcccttcttattgtatctactcaccctcccccgtagccccttaattccttcactcttagatgactctcctgaagtatatatgctccaaacacacatccctacataataagagcatagataaagttttctcaggtctctatataaaacctacagagagagacaacagtccatacaaacactgttgagtggagggggagacagcaaagctgtgtctataggataacaacaagggtgtgatagcttacttaactgccctggactatgatatatgcacgaatggttggactgcctcagaaatttgttttccaggagtttacagtctgacttgacttctaacagcatctgtcacaatatttgtgcaacttcgcacaagttgccttcattagacttagactgtgttcaagaaaactcactgtggagttgaaaggatgggagggggagaaaattgtatgtgaaacctttgagtttgtaattgtgtgcctaggatgtgaatgttctaaagccaggctccttggttctgtgagatctgtgagatgcagatgtgctcactacatactggggctcttctctatcatatcctgttcaacagcctcttttcagatttctgacagaaaacataaaataatgtcctcttctaggaactgacatccttccaaaccttaaagaagctgtggggtcccgatttcagctgtattttctctccactttttgacacctcaaagaagatgagtctaagtttatctccttcttcgcattttacttggttctggtttccaagcaccagcacgtccatctcctcctctgtgttgtcatgtattctatataggactctatccgttctttgctctattatctgtgaaaggaagacaacaaccaagctctgctgagatgactaaggaagggcagcatgtacatcaattgtcagaggagacaggagcagctttccaaaggaaacatgaggagcaattccagcttccaaactagaaggattctacctaacggatattagcaagtcccattgaagggggtgggagagtcttactaaaagcatgttgcttcttgtgtacatctttctagtcccaggctttttttcccttctgggaatccaggatggctcacagaaacaactagtagacagggaagataggtcttctccagggccagtatacaggaggcagtcaggggaaaaggtggctaccttgtggctaggagaaaggtcacttaatgaaacaagtccagagaaaaactaactaacagtaaaagacctagtgaagaaatttaaaagttaaaagtcaaggacaagaaatcattcacaatcaagtccaaatgataagggaccagatgctggtgacatacataaaatatgaacagcatttgacagtcagttttattgaccacatgattagacattatgggtagttgaccaaacagaacattcaaaattgagaggttaaaaagaggtatttttatgcttgaaatttccaaggaagataattttctcctgttaccatttctgatgggactagataggtcatttgactactgagtgcagaaatcaacaagttccctgtactagaatctatactaggccagaaaatttttcacacaagcatagtttttcctgattcctgtgtggtagtttgtatgaaaaaggcccccacaggttcatagggagtggcattattagaaagaattaggatatgtggccttgttgatcttgctgtaggaaatgtgtccctggagttggacttggaagttttagaagctcaagccgcgtccagtggctcactctctctttctgctgcctgtgggtccagatgtagaactctcagctacttacttcttctgcaccgtgtctgcctgaatgtcaccaagctctctggcatagtgataacggagtaaacctctgaacctgtaagccagccccaattaaatgttctcctttataagagttgctggggggtagccgggcgttggtggcgcacacctttaatcctagcactcgggaggcaaaggcaggcggatctctgtgagtttgaggccagcctggtctccagagtgagtgccaggataggcttcaaagctacacagagaaacccagtcttggaaaaccaaaaaaaaaaaaaaaaaaaaaaaaaaaaaaaaaaaaggagttgctggggtcatggtgtcttttcacagcaacggaaaccctgacaaagacaactggcatctagctaggatttcatgctaactcttccattatcttcattcaatactaggtcttctaacccctgctcatcaatcctctagttcatcaatgggcacacatctgctccaaacaaaagagactttgagcactcaggaggcagaggcaggcagatctctgtgagtttgaggccagcctggtcttcaaagagagttccaggacagttccaaaacctatagagaagccctgtcttgaaaacaaacaaacaaacaaaaagtgacttagaatgtggatggtaataagtgtgtaacagcaacacagaggtggaaatagctgtgtctgtgtttcagaggttacaagggtaaaaacataaataaaagtggcttcaaaataaaccttcactggctgttgtggcatgcatgtggatcccaacactcaggaggcagaggcaggggaattttggtaagtaccagaccagctaaagctacacagtataagactctgtctcaaaagacaaaacaaaaaaaaatacatattaaataaagcttttgtgagctttgcccacaagttttggcaaattctcatcctgcaaatcttaattttattaaattgttttttctgattgttaaaattgtttaaacccaattatttaattgattttaattgcttcatattttatataggaagaaaaacattgaaacataatttctagaattccattaaagcttagaataactattgtattctttttcccagtcaatacagaattgcatacatggacttaccttctggactttaaaaatcccattcacaattgttccaggaggctgagtcttcagcttcttaatcatgggagttctcccagctttatctttgatgttatttggaacacagacttggtggtcagcatcagcctcaaccacagttgaggagctggtcacctctaagaagttattgtaccaaagatagtttgatattttaattgttctctgtggggtaaacttatctttaaactgtgcatctaaaacttttacaaagaaaaaattcgtctctgtggccaccgttgcatggaatatcatttgcttcccttcccgagtttcacactcgaaaggaatcgtagctttcagcaccaacaaagccaggggatccttctgtaaaccttctctgatggcttcctgttctgccatgacccgggtcttctgaggctgtgacaacagagaagaggtgttagctatgggtcaacgctgtaaccaaggcagtcttcattcaagataaaccccaacaagccagaaaaggttgaactgaagggaagatggaggagacaggaaaagatcagactcggaattatctagctttttcaaaagggatacctaacgtttttatattcaagtggggcagtggagctgactctggagacagagtttctgaatgagaagccttctttgccatgtagtttatgaagagtgtgtcagaaacctgaatcattgctaagggcttaacctaatcctgtcttcttgtgagtctattagagcgtatttctccctctaacaccgttctgagcatttatgtggctcttgtatgagcgtgagaaagttcagtgatgtgcacagagctccccacatccacaggaatgtctctgtacataataaaagtacagatcattaaatatgagtaaaggaagagatcttgggatgaggtcctatagacaaattaaagggagaatgaaaacgagaatcaactctaccattgtgagtttactcttagaagcagtgaattatatattacggcttacataaaaaatacatctttttgtttgtagatataaatcattaaaatgacttaaataccaaaaaaggatcttgtcaaataaaatcttgtaacacaacatatgaaatattaagtatgtttcaaagggataatataacaaattattttgatttaacaaaggataaagtacagtgaattctgtattgaataaatgcacaaataacccacataaacacactacagggatattgtcaatgataaatgggctttcttctccacaatcagttatggtgatttgattctcatcttggtttttgttattgttattgttgttgttgttgttgttccaaaataagaaattaagaaggatagggaaaagtgtgtatgtgcagatctgtgtgtcctcatgtatgtgtatgctttaaaaaaacaatactattttcttacaattaattaatgacccataagcaaagagagacacttagaaaaagaggcccagaagagtaggttctgaattggatctctgggagaccttgagatgtgagctcataagtacacctcatgaacagcatccacactcaatttggtccaaagcaggaaaatgccaacttcaccagggacttttacagaatattttgtctgcaggcccaggtattttatctggatcatccagattatacaatatgtattttcatgtctgttggctaaaatacaacattttcacctgggtattgttctcttgacgattctagaaatttctgagccacgaacagaggaaatgggtgggtgctctagacagaaaggtgaacacactctaaacattcctctgtaggacatgacacttccttcatgggaaatgaaattgcatgtgcttggtggattttgtggtggagccctgcatgctactgtcaggattaagggacaaggactctcttcaagttttattgcctctgctacaaagagatacaggcatatagtgagtaaaggggttgtcgtttccatccacattgggacaaccctaaagggcattctgaacccctaagtctctcgtaggacaggctgatctctttgctgcaattccaccgaatttgaaattgtccccattccctcaatgctgaaagcaccctaaaatatactcactgaaaatagtccatgtcagagttttcttccactagaggctaagatcacaatttgttaatatgtccagagcatggcagaaattagaagcttccaggtatataaactgatgaatctgtgtgacttttctttttgtaatgccgacatgtcttccctatcctcaccttgttttcctgctttgtaggcgctgagacaaagggcagaggcttcaagtgctggatgacagggatgatcatggaaggggaccctcatgaggaccaaggagctgacctagcctaccttagcctgaggacagacttctgtagcagagtgtttcttggaggctgcgtctctgctggtggcagaggcaccaggacagttttcatcttgacttcttttttctactttctgtgttcctttcttctttgtagttttggatcgttgatcaactgcagaagaagaagaagaaagaagaggggaaggaggaagagaagaaagagggggacaaggaggaggaggggagaagaagaagaccagaaagaggtgcgttaaccagaaatgtatgggcaagcatggctgagatattagaatatcattttctctcaagaagaaaattagaagggagacagcagcagggtgatggattaggagtttcccctcttcagtgcctcacaagaataaagctcatgactatccacagacaaggcacattgcaatggaggtatcttctagaacgatgcaaccaatgatgtctggagtctaaaaggactgttttcatttttcacaatgttatctccctcccaagatgacacagtaccatgcagagagaattccatgaccccacacgtcctatgctgaagtcagagggccaggggtgtgcgtgtggctttctcagcattatgggatttcattgtaggaggctcattttcacctcatcccatgagggatgcaggggacattggcaagactggaataacagtggtcaatcaggagtaaacaaaatgcagtgggtgtcactgtgaccattatatgctctaccctatggttttgaccaatcaaagagactatcctacagtacttttaaaaggcatgcacaaccagtctgttggctttgaatcatagccaactttccactcagcctcagcactctgtttaagccttccccagacttgctgggcgagggtgtaacatatgcacaggtgtggaatgtatcatctaaatctgcccaacctccacagtggagtgatgaccccgcccccagcctcagagcaatgcatgaggcttccggaagattataggcaatctcatgcacacaaataaccttgcaaggaaacatctgatcctgctggccacagcctattgcgcaattcatcccacccagcccatggtttcaaaaaaggcctcttataaaggcaactttgtgccccaatacttcctcagagtagagcgtctggtctccccaaccctagtgactgagaagtggtgggactgggaggaattttgagccttgcctgaggttcagtatgggcccaaactggaaagaaagcctgagatgatacataggtgtctagcatattctctggccctgcctagtctaagtggcctaacagcacccacagcctttcccagcctcagaacccaatctaccaccatgcacaaatagagattctgagtatccatttaagatcgatatcctgtaaagttacttaattggaggtgatcacagatgctagccagcagctgtacctgactgtaaagtccagttagtgatcttactggaccatgcaatgtagttagtatgcttatttgaccccaggacacaggcagtagcctggtccaatcagagaacctgagaaagagtctccctgtagctgataccagttgacatatgcaaaagcccagctgggttaaacaatacagaggatgaagaggaggggaaggatatgaagaagtagaaaaacaaagacaaaaaaaaattgttactgctttctcttcctcaaatgtgcagacactaaccacgaaaagaatagacccaaagtatgggccatctagaacatcagttaatttgaacaagagcaaaaaacatgtaatcaaggtgaccatgtggtaatgtatttaaagcagtggagaagaaaacaaataattgctcagtaagaatattttgccgccctttccactgactgacccaggaacgaggtgagtgagcctctgcccttacccaacctcagcccaaaccatcactcacccgaccacccactcccccctcccccgccccaatggactgcctgcttgggggagagacacgcccaggaagggaggagctccctgctccctgaatctggtagcaccccactcttccattcctttctgccgactgaccccaggaacgaggtgagtgagcctctgcccttacccaacctcagcccaaaacatcatttaccccgacctcccagggcctgtgcctacctgcttggggtacacacgcacagacaagaaggagctccctgaatctggaaacaacccactcttctctttccgccaactgatccacaatgagtgaggagactaccaggagaggcaagaccatccagagtttctgacattgaattcctggcctccacacaccactgggtcacaagaggagatagagagaccccacctgcacccactagaagaagatatgggaagaagatagaataagatttcactcaacaacagaaagaccaatatgacaccaccagaatctagggactccactccagcaagacctgaaaagcccaacacagagcatgaagatgagatggacctcaaaaattatctcagcaagatgatagagacctttaaagaggaaacaagaaaatcccttaaagaaatagaagaaaacgcaaacaaaaaattacacaaaatggaggaaaagacaaaccaaaaaattcaagaaataaacaaatctcttaaagaatctaaagaaacccaagataaaacaaccaaataagtgaaggaaactcttgaaacagttcaaagcatgaaagctgaattagacacaataaagaaaacacagaatgaggcgatgctggaaatggaaagactggataaacgatcaggaactaaagacgtgagtataactgatagaatccaagagacagaagagagaatctcagctattgaagactcgctagaggatatacattcatcaatcaaagaaaacctcaagtccaacaaatccctaacacaaaatatgcaggaaatatgggacactgtgaaaagaccaaacctaagaataataggtgtagaagaaggtgaagaaacactgctcaaaggtacagaaaacatattcaacaaagtcatagaagaaaacttccccaacctacagaaggatatgcctatgaaagtacaagaagcttacaggacaccaaacagactggaccacaaaaagaagtccccccgacacataataatcaaaacaccaaatctacagaataaagagaaaatattaagagcagcaaaggaaaaaggccaagtaacatataaaggcaaaccaatcagaatcacaccgacttctcaatggaaactctgaaagccagaaggtcttggatagataccctataagcactaaaggagcatggatgtcaacccagactactgtacccagcaaaactttcaatcactatagatggagaaaacaagatattccatgacaaaagcagatttaaacaatacatatccacaaatccagcactacagaagtttctggaaggaaaactccaacccaaggaacataactacatgcacaaaaatgcaggcaatagataatctaattttgccaaacacaaaaagaagcaggagggcaaaatccacacacaatgacaccaccaacaataaatcgaaaacaaacaagaaccaatgaacaattgacattaatatccctaaatgtcaatggtcttaacttacccataaaaagatataggctaacagaatggatatgaagacagaatccatccttctgctgtttacagacctcaacctcaaagacaggcgatacctcagagtaaaaggatgggaaaagattttccaatcaaatgagctcaagaaacaagctggtgtagcaatcctaatatctaacaaattagactttaaactaaaatcaatcaaaagagatcaagaagggcatttcatactcatcacaggaaaagtccatcaagatgaagtctcaatcctgaacatctatgctccaaatacgaaggcacccacatttgtaaaagaaacattactaaagctcaaaccacacataaaaccacacacacttatagtaggagacttcaacaccccctttacaccactagataggaccaccagacaaaaacttaacaaagaaacaaaggatctgacagaagttatgacccaactgggtttaacagatatctatagaacattccatccaaacacaaaagaatataccttcttctcagcgccacatagaaccttctcaaaaattgaccacatagttggaagcaaagcaaacctccacagttacaaaataacttaaataaacccatgtgtcttatcagatcaccatgcattaaagctagaattcaacagcaatacgaattgcagaaaactacatacttgtggaaaatgaataacaccattcctgggttgaggaagaaataaaaaaagaaattaaagacttcctacaatttaatgagaatgtagacacaacataaccaaacacatgggacactctgaaagcagtgctaagagggaagttcatagcactaagtgcccacatgaagaaactggagtaaagtcacattagagaattgacagaacagctgaaagctttagagcaaaaagaagcaaacacaccaaggaggagtagacgccaggaaataatcaacctgagagccgaaatcaacaaagtagaaactaggaaaacagtacaaagaatcaatgaaacaacgagttggttctttgagaagatcaataagatagacaaacctctagccaaactaaccaaaaggcagagagagagcatgctaattaacaaaatcagaaatgaaaaaggggatataataacggacactgaggaaatcgagagaatcttcaggtcatactttgaaaacctgtactccacaaaattggaaaatctaaaggaaatggacagcttcctagataaatatcacttaccaaaattaaatcaagatcagatagacagtttaaatcgacctataacccctaatgaaatagaagcagtcatcaaaagcctcccaaccaaaaaaagtccagggccagatggcttcactgcagaattctaccagaaattcaaacaagataattgcagtactcttcaaactactccgcacaatagaagcagatgggatattgccaaactctttataacaggctacaatcactttgatacccaagccacacaaagatatgactaaaaaagagaactatagaccaatatccttcatgaacagcgatgctaaaatactcaataaaatattggcgaaccgaatccaaggacatatcagaaaaatcatccaccatgatcaagtaggcttcatcccagagatgcaaggatggttcaacatacgaaaattcatcaatgtaatccaccatataaacaaactgaaaaagaaaaaccacgtgatcatctcactagatgctaaaaaagcttttgacaaaatccaacatcccttcatgataaagatcttggggaaaacagaaataacaggaacatatctaaacatgataaactcaatatacaccaaaccaattcccaacatcaaactaaatggagagaaactcaaagcttttcctctaaaatcaggaacaagacaaggctgtccactctctccatatgtcttcaatattgtacttgaagttctggctagagcaataagacaagaaaaggggatcaaagggatacaaattggaaaggaagaagtcaaactctcactatttgcagacgacatgatagtctacattagtgacccgaaaaactctgccaggggactcctacggcagataaacaccttcaacaaggtagcaggatacaaaattaactcaaaaaaatcagcagccctactatatacagatgataaatccaatgagaaagaaatcagggaaagatcacctttcacaatatccacaagcaacataaaatatcttggggtaacactaaccaaaaaattgaaagacctgtacaataagaactttgagactttaaagaaagaaattaaagaagataccagaaaatggaaagatctcccatgctcttggataggtagaattaacatagtaaaaatggcaatcctgccaaaagcaatctacagattcaatgcaatccccatcaaaatcccaacacagtttttcacagacattgaaagaacaatactcaactttatatgaaaaaataaaaaatccagggtagccaaaacaactctttacaataaaggatcttctggaggcaccaccatccccgacttcaagctctactataaagccatagttctgaaaacagcttggtattggcacaaaaatagacaaatagaccaatggaattgaattgaaaaccctgatattaacccatgcacctacgaatgccttatttttgacaaaggtgctaaatctatacaatggaaaaaagatagcatcttcaacaaatggttccggtacaattggattcggacatgcagaaaaattgcagatagatccatacctgtcaccatgcacaaaacttaagtgcaaatggatcaaagatctcaccataaatccagccacactgaatcttctagaagagaaagtgggaattacccttgaacaaattggcacaggagactgcttcctgaacattactccagtagcacagacattgaggtctgcaattaataaatgggacctcctgaaactgagaagcttctgcaaggcaaaggaaacagtcagtaggacaaaacgaccacccacagaatgggaaaagatcttcaccaacccacatctgacagaggactgatttccaaaatatattaggaactcaagaagctagccaccaaacaccaaacaatgaaattaaaaagtgaggtacagaactaaatagagaattctcaacagaggaatctgaaatggctgaaagtcactaaagaaagtgctcaaaatccttggccatcagagaaatgcaactcaaaacaactctgagataccacctcacacttgtcaaaatggctaaaatcaaaaacaccaatgacaatctatgctggagaggatacggagaaaaaggaacactcctccattgctggtggtagtgcgaacttgtaagaccactctggaaatcagtatggcggttgctcagaaaaatgggaatcagtctacctcaagatccagccattcctctcttgggtatatacccaaatagggcatgttcatacaacaaggacatatgttcaaccatgttcatagcagcattgtttgtaatagccagaacctggaagcaacctagatgcccctcaactgaagaatggattgagaaaatgtggtacatttatacaatggagtactactcagcagaaaaaagcaatggaatcttgaaatttgcaggcaaatggaggaaactagaagaaaccatcctgagtgaagtaacccagtcacaaaaagacaaacatggtatgtattcactcatatatgaattttagacatagaacaaaggattaccagcctataatcctcttcaccaaagaaactaggaaacatgaagaactctaagggataaatggaccccagaaatgggaaatggcatgaactcctgagctgattgggagcatgagggtaggggagagggtgctgccacaataagagcacaagaagaacaggagtacaggagaggaaatggaggagcagaaatattgagttggtggaagaatagaggagagagagcaggatgagagataccatatcagagggagccactataggtccgagaagagatctggaaccagggagatctccagagacctacaaggatgacatgatctgacaatccaggcaatggtggagaggataacctaaaagcccttcccctaaaatgagattgatgacttctctttatgccatcctagagccctcatccagtggctgatggaagcagagacagacatccacagatatacactgagctgaaatcgggaattcagttgaagagagggaggaatgaagagtgaaggggtctgtaccaggttggagaaacctaacaggaacagttggcctgaacaaggaagggcacatccaccccagatgctgtctgggaggccagtacaagactgagccagacccctgaacatggatgtcaataaggaggcctctgcactccagggagcctctggtggtggattagtattttttcctggtgcaagaagggactttgagagcttatcccacgtgaagggttacactctggccctggacacatggggaagggccaggaccagcacaggaagatttggtggactttgcagagcccccattgagggctctaccctgcctggggagtggtgggtggatggggtggggaataggttgggggtgagggaggagggatgggcatgaggggagggagagggagaagggacttacatgtgaaacaagcttgttccctaactagaactaataaataaattgaaaaaaaaagaatattttacctagagaactgtccttcaacaagagggagaagtaaactaacaagatggctcagtggataaggacatttgtctccaaacctgatgacctgagttcagctccaaatctcccttgctggaccgagagaactgagccctacaagctatcttctcatcatcatacatgtgctgggacacacatatgactcccacactgccaaattaaatagataagtgttaaaagggatttttaaaaggaagatgtgaaaatcaaaaggcaagcgcctagcttcacctttcaggacttgtcaaaggagttctttaaggctttaagattaaaagtggagctaattgattaataaataaatacaaatatacagaattcaatatcgtaagtcatatgtagtcatatttagaatactatacggaaaaatagaaggaaaacttatctataatagaaggtttaaaagaaaaatgtatttttaaaaactatacctacaattaattgtaggggaaactgtaaccactcctgctaggggctggctacaggtgtgcctaaccacgccttctagggcgtggtcagggtgatgtatggaaggtttaagagtgaggggcacgcacctggcaggccccttcttctgtttcatctttggcttgctgtacttactgctgccccgccggctggctaggtcgctctgtaagtaaggcttttacctaataaattccctggctccatattggtaattcccacaataattaattattataataaatgttacaaaaatctgaaaattggattgaactctaatttcctgagcctaaaacagttgccaataaccattaaaaattcaaggaacatttgtgaatggataagtggattgtcaaaggagtgacatattcattttttaagctttatgatatagcctgggtacccaggtcaatggttgggttttattttactctgaaaaagccacttcttgtcttaattttgatgtgaccatctatcaaggtggtcaatgttcaataatttaagaaactcatggacaaagcatgtcataagaaattattagctatggtttctcagagaatctgaaccatttcagtgatgttcatggatttggttttgttggaaatcaaatgatttattgaatatagccagcaatagagtgaactctctagtcacataagtaggtattctgtcactatgttttagacaacaaaaagtggttgagtcttggtcagggatgtttacagagacctttgttcttgtaggcaaagtaggcccagagtctgtgggccacaagagccaggaacatgtctaccctagagtctgtgggtcacatgagcccagggcatgtctaacccagagtctgtgggtcacaagagccaggaacatgtctaccccagggtctgtgggtcacaagagcctggaacagctctgaattcagcccaacacaaaaccataaacttacttaaaacattaatagagtttttgtcatattttaagtccatttagctgttatgtagcatgcactttgtaaatgatgttggcatgtgactaaatgtcaaaatgactagaaatgtttgcaagatgttaaagtgatcttccaatgttctatgaatttcttttgaaaaacatgcacataaaaacattcagtctatatggacagtataggagaggagaaaagagagtcctggggtcccagaagaataaacacatcatcctctcccaccacagcactggtcttttattaaatgtcattcagaatgttactgtggaggcatttggcagagcgtcatcttcccactggatacttctcgttttctttcataacacacacttttcatctatctaacttatggttatatttaaagaatttggttagaattgcttggttttatcacacttatgtgtcctcctattttttcatcagatttcctgttcgagccttgtttattaggcagaaccctgatgtcattctctaacgacattttttaacttgttcagatatctccagttttcttgagacaaggtcatgactagacacgatgaacatttgccagaataaatgctaagtgagactgctgggaaacaacccagaaatcgacaggcattacccaacagcccgaggcatcactgacacagctgtgctgcacttcaagcgggctcgaagatggcttcagatagagctttgaagctgtataggaactaaactgacttctaggtcagcaagcagagctgcagatgggttttcagccaggtctcacagtaggtcattttgagctaatcaaactgctataatcccaccatcattagaaacagtaaaatagagggggaaatgggtaagaaggtttatatcattttatccagaaaaaaaaatcaggaatatggactgatgggggtggggagtagcacagtaaaagacagcaaatgtattcatttggcttgatagtattaaacaaagtagctacctgaagcaattatgtgttcttactgccaccctgtggccatatgaaagaactatatattccttctaaatttcagccaccctttgaaaataaaggatcaggccttgctctaagttcctcaaaattacgtaacaacttatatctgtgcagaattttaaaaggcttcctaaagaaagagtgaccaggaccatggtgggctggctcagtacagaagtcgatagtctgtggcaaagttagaagattctctggtttgtccgttcaaggctgtgctttcttgatgttattgtcaggccttcagcaaagtgtgaaagcaagccttaagtactgtgtaacgagaccttgactgctgtagaatattatcttaaggttggttacttttgtttatgctctggaacatttgtttaatgattcaaagacgtgcttgattacataaaattcaccggcagtcagcaggctgtgtcagcaactagccaacaagaagtcgtagggaggagccaggtggagaagggtttaaaaggagggatgagaacgagcacttgttggaggactggaagaggtgagctaggttagctgctctacctcaacctttgcgtctctagttttttagtgggacagagatttaaataagttttcttagtagctttgaaagagtcggtgcctgagggaacaggagtggcagttatcgagtaggatagctgttgcttaaaaggaaacaataattaaaaaagaaaaactacagggcatcacttaggtaagccacagccatgtggagatacacagattaatagtaatgggttaacaattaagagagagctagccagtaagaagcctaagctaatggccaaacaattataattatatattaagtctctgaatagttatttcatcaagcagctgtgagacctggtaggtggagagaaaacaggtccagtggggctgagacagatggagaaaatttccttctccactggaacattaacactgccatcctgtgtccgaagtttctgcaagtagagtgaagacaatgggtggcagccctaactgctggcatttgtggcaagtggctgaggaatctgtaacaccctttttagtgactcccaggcagggaggccaagggactggtgattaggcaaattaattccctacaacactcctaagggtttctctctctcgtgttattacaggaggggcacgtccacatacctttctgcttttgttcctcaagacggtttgcagcatgcatataactcaatttccggaaaatatgaatggtctttgtcaccgcagatgctgggcctgcactctgaatcagttggtccgctaactctgtcctgtttgtagcctcctccagtctgctccttgagatctcaaactcatttgggaccaagaacttgaaccgtttcagttcctcctccttgatttcatccaggccggacaacaacagtatctctctatattcattctccatctcacagcctcgagatcagcctgaaacaaaaccgtaagactacaggactggaaacaagtctatattcaggatagtcaaggtgagtgctcagcagaaaaaccacatctgtaagaagattattgacagccaagttgaaaagtgctccaaagacatgtaagagtatgtttgacatgactaataattagttacttgggagagaaccaggtagaggatgtcatgagaggaaaacaactcgccaaagaccttgagggtccccaccagtgcagccaatgacactgagctacaaaaagtatggttaatgtggcaatgctattgttcctggcaaagactgggcaggtaggaagggatggagtggctctgcttacatgggtgttgctcatactctataccctaaactaccatcagcatccttaagaaatacacccaaaatagccacagtgataactctgccccagtgcaccagtctttttgacagcactgaggaaggaaatctcctttggcttagtatgtgtagcatgctaattatatcagcatgcttcctgctggtctgtgtgaaaccttcattttcctctatctctcttcaatagaaatataattgcatttaataacattttacatgaaaaaaataaaactgatttctgtgaaggttctttaccttatttgcttacagtttgcattttgttacataataagtctacttgaaaagttctcacatatttgttggatgaaactcagtagtagaccatataactactatgcaggatgccctgggtccaatggcaagcaccacattaaaaaaaaaaagtgaagtggttagagggtgggttatatgcaaaggaaatgcattcacttctgattggccgcctcatggccagcagtaggtgcagctgtaatttcacagtgctatgccatgtacaatgtgcattcaaagtgcttgcacaggaagcttagaagatggggaaaaaagcatataggcaggactgacttatctctaaattaggaggattcttgccaccacacagaggtggccagtatggcctccctgaaaaacatcagcaattgtaggttaaatttagtattcaaagtggaatggcttacctgatgccacacagcttgtaaggtagatggctcaacctcaagtctcctaaattcaatcccttttctcttttttttgttaactgccttcgtattattcgaagaatgtgaaataacacctttaaatttaaaaagattatatatattaattatattatatatagatttattgggtatgatttgaagacacccattccttaattaactatatctaactcactggcaattttaataataatataataattgtcatgtttatcccttgctgaaaccatttatctgtcttcacagggtgtctgcatagctgaaacccagcctctgtagatttctgctcaaccttccgtgggtgcattttatgaaacaggacctggccctgttcctctctgttaccacacactgtttcctttcttctctacttgtctacttagaaatcccgtagtttttgtttgtgttttagttcacattctgtgctgggatgaaagtgacttgtgggcaagggctccattgttcatttctgcagtcctagctcctaaaatagcaccagggatacagcaagtattcactaaactcttgtggggtgagtaggctaggcttctccaactaaaaacagctctaagcatctctatgttctgggctgtattaggggtgcatccggtttgactaagaagcccagttgaaagatagcagaacaagatggcagctaaataagcaccctgagcaaccatcttcccacaggcacacaaactttgatcaactgtttacagtccaaactaccctccccatacccaaagaagtcatttgagagaccattgcgtctagatttgttcatggtggtatgttttcaggcccgtgaattgtggagctcagcgggacaaggagttaagtccaggctttaggctttacactcagctccaggccatcacaatgaagcactgccctgggctaaaatgagcaactctaactatgttagccagactgctgatttcctctagctctcctccttggatctagctggggcacaagaatggaggaagaggactccagccacaggcaactagcccagaattctgcttactgtgatgggaactggtggaaatcagaaaagaaaagcctttagagccaggccactgttcacagatgaagtctcccagatagcactagcatttaaacagctgcctgcatgccagcggggcagactcaagtttggctttattgttgccagccttgaagtgggcaaagtacacagtcctactcaaactccatgcttttctctgactgtgagacccaggtgtaatggtgcccttgctggatcctaggcttgggcatcagctggcttcaggttagtgtcaccagactaaccagttagtgttaccagattaagacatggctatcaccaagcagagactgggcccggctgtcatggtgtcatattttggcctgtgcctctactggtgtggcacagacctggatgcactcataatgggtgatttcaccagaagacatgcaagagagagagagagagagagagagagagagagagagagagagagagagagagagagatgaaacaagtcagagctaactctggccactgccaataacagacctagcagccctttcaggaagtggctgttgagggaggtaacaaatgaaagtacatttgtgttccagaagctaagaaaagatcatgcttaaagtaaacaaagaaccaactgtgtctcttctgcttgtttgttttgctgtaatgctaggtaacctgtggactacagatctgtcatggaattaagtgacaagtagagggacagggacaggaagctgtaaaagggccaaggaaatgagatagaagattgaggcagggcaggaaatggagaaagtaatttgtgcatgtgtgtttgcttgcttgcttgcttgcttgcttgcttgcttgcttgcttgcttgcttgctttctgccatgggagaaattagactggttccacactgatgagaatgatctagaaggggcagcgaatttcggtatagaagaacaaaagggaaactgcatgtgtgagtgagccttagggtgattcctctgcagcacaccacctcaaacaaaggaaacccactctccatttcctgtacctgatgtcagctgtgcgggacagacacccaccttcctcgtgccaagagttctgaattcttaaggatttcccactgtgttcatttgctgcctacggctgacaactatatagctagacagacacagactcggatcccgagtctgccatttgctagctgtgtgacatctggtaaattacaaccttctaaagtgtctacatcctcaagtgtaaagtggaggagaggtgatcagaaccgttaaatgactactgttacaatgccatgccattgaatcaggaacgtgtaacagaatgacgtacgagtaatcactcaaagtcagctatgaatataaaaaacaaatgatagacagattagagggagtggtgttttatgacaaatagcagtttaacccgggatgggaggtgatggcttgtgtttaaaactggaaaaagaagatgaaagggtgtttttctaaagctgtgttttgaaaagacagaggaggcagaacagaagggaatggagaggtttgaagcttgagctcttgcaagctggagtgaaattgctggctcgttgtctgggctaaatcagagggctcatgggcagatgtggccagtgtcacacggagggagaaaaggcatttactcagagactcccagtgctggatgaggtttttaagtcactaagccactgggctactgccctagaaggtccctccgggaccctgcaagaggaactgcagaaaatgtcagtctcttaaaaaagccggcaggaaatctttaagacaggttgaagctcaagagaaatgagtccaatcaagagactccagggaaaagggacagagctgaagtcacagtaaaggaaatgtctaccttccaaggtgatgtcatttgctcaggttcaaatcctcagaggctgagcagcatggcccgtcccccagtcttctttacttatggacaaaccataaggtccccctgacagaacactctgcttcacttctgatccctgggtgccccacaagcatgtactgctggtctccatctggcacatgaagcagttttacagtaccaccgccctctgtctccaggcaccacaaagattcccaggcccccaggtccatagcgggtaggatccagctaaatcagctgagataatcttcctttcctagctaccaaaaaaagtaattcttgtagacacttcctgttgattcaccctaaagatacagtgactcaaaaaaaaaaaaaaaaaaaaggaaaagaaaagaaaccgagaggctgcaaaaaataataacagaagacttcctggtacttgtgtagcaaacagacttacaggagcacttgatttctgatcactaacagacattctcaccatacatagaggataaaggcaagactgagatcttaaggtcaccctggtgtacacaaatgtttgactctaaagtctatgctatatgacagcacgtgacccaaaactaaaacccaactaaaataaaaccaaaaatcaaaataaaaaaggatttgctggtctcagagggcaaacaaaattacacgtaaaatcctccatcgttacccaggctcctgccccgagtttgaagctgttgatgtgagcatttgtttctaattcaatgcatcatcaatgatgatgcaaatatttacagtgatggtcagaagtgagagtgtaaatgcaaatgggaaggttctaagtgttgagtagctacttgaagtcatggaagtagaggtatgatttaaaacatatagtaacatgttatgcaaacagctctaacagaagcaaactccagaagtcacaagggtggatgaagaccatctaaccatgccctgtgatcacataaccatccaggcaatgtaggacacccttttatctctcactgtttatactatattatattatttatattatatattatatattatattattgtcccttataagactgtttattttctaatgagggacagaaagggagaaaagtcatataggagaggaggtggggaggctctaaggaaagtggagggagggggaactataatcaggatatactaagtgagaaaaataactgcttttactaaaagtgggaaaggggaagtaccttttagttattgcattactttttctcctttgtccaagtcattcattcagttaaccatgcttatttgggtctacatttaggctttgtgctctgacccactgattacatgttttttttttaatgttttgattctttatatgtatgtgtgggggcctgtatgagtgcatagaaaaccgtggagtccagaagaggtataggataccctagaactggagatactagcagatgtgagctgttctatatgggtattgagaacccaacctgagtcctctgcaagagcagtaagcactcttaacctctccagcctcctgattgtatattatttccccactgtcaccctgtcttggtttccagtctgacttttagtctcaaatgtgggtgaatccttcaagattccatgaactttttccatataaatttttttctttttttataattttttccattcatttatttagctcataaataaagtcatgcacaattatgatacacaatacagtatgttcacaatggcatggctaaattaaaccaattaacatgttatatcacacatattcatcatttttgttttgagaacacttaaagtatactatctcacaacttttaaaatatagcatattgttatcaaccatatttatcatgctctcagtagacctcaagacttcacagagtccatgcctcttgtccaactgcagttttatatccttaaaccaatcgtttccccattgttaaaagacacacattgaagcctaatagccacaattctgctgttcccataagttcatcatttctaggttacacataaaattgaaattgtgtgacatttgtcttccagtgtgtcacttattttatttttggcaagcatataactttattgcttactaaggatgaaatcaaatttgcatgcacaagtgagcactaactgaaacaccttggattcatcacatacttgagtttcaattagcttataaatataaacttatatttatatttatataaaaagagcaataatggcaatatgttatgcatcaatagcagcaacagcttttccaggttctgcagtcatttaaacaaaattgtagagacatccagcacactccctttaaaaaaaacaaaaaacaaaaacaaaacaaacaaacaaaaaaaaaaagtaaaaaacaaagtcccagaaaacagcatataaaatttaaaatcaacttttgagtatccatgaggtcattcattataattttgattacattgaatttataaaacaagttggaaaatgacttatggacaatactgaatctttctctccatgaacgttagctatgtctctattttgttcttcaatttattttctccattttgtggttttctttatatgtatattgtacatatttagttgtatttatgactagataacatcatttcttggagataaaattgggttttcactttcaaccactacttgtttgttgctcgtatattttttaaaaagtaaatgacttttgttgtttggtttggttttggttatggctttttaaaaatctctcttgggctggagagatggctcggtggttaagagtactggctgttcttccagaggaccctgattcaattctcagcacccacatgacagttcacaactgtctgcaactccagttccaggggatctgacaacctcatgccaatgtacataaaataaaattaaataaattatttttagaaaaactcatcaaggctttcaaagtattgtacacaaatgtattcattaggctttcaatacccatgggatctgtggcaatatcctgcctgtcatttttcacactagttgtctgtttttttttttctgttaactgtgagttttgcttactcatacagtagtataaaacactaaatgcccatctatttagccagcaactgtgaaatgactgctcttgaatattggaatcatctatacttgtgagatgtgggaattctcaaaatggtaaaaaagagaggcatgagaaagctacattttcagctttgtttgcaggaaactgaagatagatgccagcatagttaaaactgggaaattaaaagtgtattatcattataaaaggctgaacatggccaggcaaaatggcacacacctaacattgcagcacttgagaagcaggcataagacagttgtctcaagttggcctgcatgtcaagctctatgccagtcatgacttcagagagagaccctacctcaaaacagaagaaacaaaaacaaaagtctaaaatagttgctgctagtggatgggaatatatgaggcagagttattctcagtctctctctctctctctctctctgcccagtgtgaggggaaaaaactaaggacattgtatatgctaggctggcactctaccactgagcaatatccccatccccaaagaagctactcttcccaccgttccggtactatttgagttttaagccaaaccaatgcataaattcataaaaaatggattaaatctaaaacataaggagcccactaattttcgctaaaacacttcactattctatcaccgccaggactcacacataataacataatgccaattatgatctgcaataaaataaataatattttagaaacaaaattagtttacatccagataaacaaatttataatggattcattagggggaggaagcacgtagactcatcttgttcagaattgattttatttttaaaaaacttttgagacataatttccattctgatcccaaacttctcttgaactggtggttcacttggttcatgccttcaggggctggaattaaaggcaagcactacatgcactacagtacctggctcagagtcagctcctcagcaagtaggaattctataaagtggaatggaagctatttcatagttcatatgtgcatgttatatatagcataccacacacacgcacgcatgcacacacgcatgcacgcacaggtacataattgtctcagacacaaagctaaactttatcactcagccactgagagctaaccttctcccacattaccttacaaaacactaaaataaccttgcctcctaacttaagctcctgaactgacatgaagtgaagatgtgaagttacttgctcaggaaaactccactagcttgtctattgttttctgctaaattgtccattttcttctccctgttatgcattgccttttaaaaacacattgaaataactccatactcaatatacaaaagcactgttaggagtgcaaattaggcaaaccctagaagggtaggtgctacgatcccccagttctgcccattcccatttcttgctcagcccatcatccccagagcctgtcacagagctcagaaaacagctatatttccttccacaccagaatcaaaaaacctcaaagtgtttgagattttcactgcaaacaacagaattgactctaggtagtttaataaaatctgttttcttaaaaataataacccctcagagatcactgaaggctgaaggaacaaagtccagcataaactcacaggaaaggggccaccaccttctcccctacccacacctcaaaccacacagtaaaactgttctgaagggagatgctcactgctgctgacacctgcagaaagtcagggtctggctccatggcaactgctgcaacttgcatgcaaacgctgcctctgtgccagcagtcccattgcaacttcagttggtacctaagagctagacactcctaaagcagccatattggcaagatacatgtcctacatggtcccagttcttataccaaagatgtcagactcaaacttcaccaggaaagcacccattaggcaagcctggtctgctgcagacatctgcactgcaaaggaaacagaaagtttgcctggcttctaggttggaggagggtaggactaatacatgtgaagtatttgtaagatgctggaaagacccaaatgtgacatgtgcccagaaaaaaataacaagacaacaacaacaacagcaaaccctgttcgtaagacagcagattgaaggctaagacccaagatgctgggtcaggaaaacatgagaacaatggcatcactgcaaaaacaggaagaggaggaggaggtcgtggcaggtgacaataatgtggactgtgtgtgagaagtgttcaatttgaggtactcaggagatatgtaaatagagaggtttaattgaatatatgagcctggagcttagatgaaaggtcaaaactctggataatgcagacagcatcagaatacagatggcaactggtgctgtgaaaagaatgtggtagagaggagaggagagagatggaagcatcccatagagacccacagagctcagacagcacaatgctgggcaggggaagagtgagaaagggagactcacaaagaagtgtcaggacactagagaaaagaagcagaaacttgtgggtcccagaagcctgggcacaggagtatggagagcaatagaggaggatacatttgaaacttgctaagagaatagatctcagatgttaatgacatacttacaattaaggatacctatgtgaggacacacacacacacacactcacacgaatgcacacaaacacatatgtacatacatatacacgtgaattagcttggttctatgataatcattccacaaggtatatacacaggaagacagtacattatgtcctgtaaacacataccagttatctgtgtcaattacagctcagtaaagccagagagaagaccatttcagaccttctaaattctattaagatttaggaaacaagcaattagttatctacagattttagcccccattttccaatttctggtctagctttctttgcttatgctgggctatactgtcctgaaacaaagatgaacagacaacagggacaaagcaagtggccttggagaaagctctaagcttccacagctgcaggatcatatacatttgctgccctgtggagagttctccttacctactatctgcccaatggcctctgtttctcaagtgtgttgtctgctctcacactggcacacttacctagtagcctttggtcgggtctgttcctacatccctcactcccctactcttgagttctgctgtcttaaaaagatcttgctgttcctttgatcaatcaattatcccagccaggtctgtccatacagttcacttcttccaaaacccccaagaccaaatccagaatatccagatcttcctatcacaggaacatgatacacagaggttcatgataatataccttacaaatgaaaataacatcagcttgtgtgaccttgagttaagtctctcagccttctgaaatacctagtccaggagtgttcccgagtgcacctatggggcattatgaaaatttaaagagtttaaacaattaaaatactaagaaatgttaactggaaaatataaaatattcagtaagcactgtgcattattactagtattatgacattctttatattatttctgctattttcatcaaatggaaactattggaacacgcactatattcaagcatattggttataaatcaatgtacacatcagaccagccatggtagtgcatttaagaggagggagtaggaagatcattttgaagccatctttggctacaaagtaagttcaaggccaacctgggctatataagtctgtgtttcaaaataacaatgaccaaagagaatgaaatatatggagatctcaatccacaattgttttttgttgttgttgtttggttggttggttggttggttggtttttcattttttcaagacagtgcttttctgcatagctttgtagtctgtcctggaactcactctgtagaccaggctggcctcaaactcatagagatccacctacttctgcctcccaagtgctgggattaaaggtgtgtgccaccaactgcctggctcaatccacaattgttaagtgcatgttttttactaatatccataaactattctaaacccaacttaccaagactcatcctcaacccacacactagaattcaagatgtataataacccaaacttaagacataacctctctcaaaaagacaaacatgatatgtactcactcatatgtggactttagacatagagtaaaggattaccagcctacaatccacacttccagagaaactagtaaacaggaggaccctaaaatagacaaacattgtccctgagcaaattgagagcatgggaagaggggggagggagctacgagaatgagaagggaagaaaaggaagaatgcagaggtcatgagggagcagaaaggttgagtcaggtgaagaatagaggaaagggtatgtgataggtagggtttagttggggggtggtaggcgaggaagggagggagaagggaactgggattgtcatgtaaatcaatcttgtttctaattcaaattttaaacaatgaaaataaaaaaagagatccctctctctttcttgaccctctctgtctgctcagtcccaccatactgatgacaggagtgacaaggatgagtcagaggtgagggtagggacatggcagacagtaaggggactcagttgccctctgatcctgcaagtgaaatctgtatgaaaggaccgtccgtccctgtgctggggatacctgggaatgagagcaggttttcttttccagtttacagcccgacatttataataatcatttgctaatgagattttaatgataataatctatcacgccatttctatgtgtaaaagacaggttcttctgttgcattttccttcataattaggaactttctacttacaattgcctctcacctaccatgtcaggtgggataaatattacaaaattacgggaagagttaatgcaggtggtgataaaacagagtagtgcttcagatggacagaaggacaggaaaggcagaggccaagacagacacacagtcatatgatatactcagcctaactgaaggtccagatgactgaattgtccctagcacaccaaagtgaggggtgtgtgtgtgtgtgtgtgtgtgtgtgtgtgtgtgtgtgtgtaacataaaatctctgtctcgccaagatgttttataaatcaagtgatataattgaccaccacaaatatgaaggtatgtgacacacaaggattcccatgtgtcaatcgggccctatcatctattgatttgtaatgtcaagggcttcagcctgattatctaattaaatttgaaaaaaaaatgtgcttttgcagatgggtatccaacacctcaccccaatgtcaacgaagctgtgttgtccaaataccaactgcctctcctctatgtgttgatggctaaaacacatatatacataaatatccatttctcacattttattatagtctatgacccaaccatcttccttgtttgtcttttattcaaataaacaatacaaaattcttcctttaaaatgatgattaggagttgtcacacacatgacattatttccacagtctgattggctttttctggcttgggagaccactgaccctgagcctctaacttctgtggttacaatctttgtttcaagttattaatgacactcctaacaaccctgcaaagtaatgtcacatccattttgaagatgagttaaaaaaaaaaaaaaggcttaggtttgttatgtgtatgacctaaggtcctattagtaatgaattgtagaaaaaaaaaaatcctgaacttgggcaagtagaaaccacagcaaggattctcacaccttcccgtattaccccacacagcttcctggtaggaagttaatggattcagctctgaccaaggatgaaaacagtagcacggagatgaaaagtagctgtctactaaaagacttccctcagctaactcagctagctcacccttacaacctcccaggcttccctgctctgtctctttctggcatttcctaactcttcactctttccttagtttcattatcttcttctctgaataacacaaaacaaaggcctctgagctctctgctcagctctttaagtgacaaaccaacccacacaaaaatggcctccaagacatgtcccctgaatccatgaacaagtaggtaataaaagcatgcaaagttgctaccgtgaacttattttttaggacttcctcaaatgactttgtgttcaccaccaccccaccccatcctgtcttacttattctaactgcctgtggttcagtaactgcctattttttagtaactgcattggaaattgtcaccacccagatcctccaatcccatagcccagtgctcagcctcccagagaagagtacatgctgctgatggctgagttacataccagaatcaacctctgcatagggagccaccttgcttaaggtcacaccactgcctgtagtcagctggaaggcaagcttctggaaaagttgccccagctagggacagctggaaaccatccaggcctgagggaaagggaggggacttgtacagctgccattatgaattcatgtgagttcagcttccccctcggtccaatgctgtttccctctcttatttacaaatgctcctgggactcccacaggcaaatctcaacatctgtgtcttggaaacttgactgaatacaatactctacactcctaacgtcagtcatatgcacaaatattgtcactttagctaaagggtaagactgcagtattgacatagaaggcacatggatatgatgtccagaagcatatgaagaggtacatggtgtaaaaattaaaatctatgagccattcctccttgtatcctatttgaagtgtttacttcatatttcatagctttacatagctttgccattgtaatattttcatgcatattgacacttggatatcctgcccttttctatgtccttggttttggtatctgtatagagatttagatactttctaagctttacttcacattgtcaacatgaaaactcttagtacctttgtgtatgttcccatgtgtgttggttcatgaatgtgtgttgattgtgtgtacgcctcatgatttgtatgtgtatgtgtgtgaatatgtgcatgtatattgctgtgtgtggatttttatgtgtgggtatgcacgtgggtatatgaaggggtttgtgtctatgtgtgcaaatgtatgtgtacggttacatcggtgtgggttatgcatgtgcacatgtagacatgtgccatgttgtatatagaatgcactatgtgcatgtgtgtgcacttctgtgtaggtgtgtatctgttctgtacttgtaggtatgtatgtatgcacatttgtatgtgagtggatgggtaggtggatgtatacatgtgtgcattgtgttcatgtgtatgggtgcacatgaatgaggatatatgtatgtgttcatgtacttgtgtgtctgtgcacatatgtgtgtgcctgttcatgtgcctgcacacatcttacattatgctatttaccatggaaatagagatacaggcacagttttaattaatggctatatatcttgatataggttaaggtgaagtatgtcagtacaatctgaacatgtaaagctaagatactaatcatacaaacgacacacaaaaacaggtcactatattgcagagactgaaaataactaggtaatgtactagatgacgtgactccatgactatacaagcatcaagagcttatggggacagatataaataaagctctaaataggcataaaggaaacttctcaaagcatacccaataactacaaagaagagagattttcataagttatctgcccaacccctgtcaagttgaggttctcatcttttggaaagacatgaattgaagaataaggagggtgaagaaatacagatggcaccatatcggcaagctgagagaggaatggatctccagtccaaatcccaggacttggaacagctgttggacccacactccgatagtgcaggtgcagatgggacagggtccctgcctgagacagaaaagaaacagataaactggagtcagagtctgaaatattgatcatactctcagtctgtttctgaagcagtgaaatcccaaaaggacattaacacactaacaatttcgtgacatttattaatggaacaatgttagtaatggcatataaaagtctacaaaatcaagcattctactcctgccccaactgtatagtattaaaaacatctaaatttgctgaagttcggtggagccctccctcccttccctcctttcctcccttctctccctcccaccctccctccctcactttcctccctccctctctctgtggttgtgcgtgtatgatatatatgtacaggtataaaaatatatacacgcgcacacacacatacacacatacaccacacatatatgtgcaggtgagttcctccatgcccagatattcatgctgagtatcttccttaatctccccccaatcttatatttgaaacataattgttcatttatcctggaacttgctgttccagttacaatgggtggccaactagccccagggatccaactgtgtctgttttccaagcatagaggttataggtgtggattatccttagctttttgtttgtttgtttgtttgttccgggattctaaccacaggttagaatattgcagaataaacagtctaccggagacattctctaacccttacatatcttctaaatcaaactgctgatggcacaaggagctacaacttgtttgaaatatatgtgaaattatctactaattttgaaaatatacatattccaagacaactttcccatttctggtggaagtgttcaaccacactggttggtaaaacctaggaggagaatagaaagataggtgcaagggagaagaggaggggaagtgagggcaaggggaagtagaaagaaaaagaggagattacagtatcttcagagagtgctatatgatataggtgaaaatgaactacaaacaacctgaatgagactaccattatatgcaaaataaagaaaatacatatataagaatatgtgtattcaatatataagaatatatattatatataagaattgtatataatactatatatagtaatatctccccttttaaaatgtataaaaatagcataatatctaatgatacagagtgataccaactcacagcactcaggcatctcaggggggcagaaagtggatgggagtgggagtcaacacagaggccttagaagtcatgatacaattctgttcctaagctaggtgctgggtccagacatacttgcatctttacatcttatcatcattaggtgtatttctgtgcaggaatcaactgtttttagaaacaatatacttggtgaggaaattctttgaaaattgttagtgacttgccagctaaatagcccttgcctgttttttaaaaaagaaatttatgaaagtttacattttcagatcaattttccaaagttaaggattgtttttaactgtctgctttgtacctataatttattttcagtagattattctgtgttgcttatgctagaaaaaaagagagagatgtataaattctcaaacaaacatacaattttcttgtgttttaccacttattttattaagttcacttgttcttacctttgttcttgttacaaaagcaatttaaatcatagctttaaaaatgagaaaatatagacaaaccaaagtagaataaaaaaccacttgcagtcccactgttgagaatgtgaaactcttgccaaatgattttcattgctgtctatgaattaatataattatggaaagactggctatttttgtatgtaggagtgtcctacaatttaccatgattcatttagctaatctaaactcaaaagaagaaaactttcagatatgccatgttttcctctttattggaaagaatttgtagatgctgtcaaggatatataaggatatataaggagcctggatggaaaactcttttcaagggtcaactgcaatcaaccgggttgattctgtgagccaaccaacccccacagtaggaactctggtgtagaaggaatggtatcttacatccgccattgggacctcctggcctctgttcatgatcaagcttttaagatgtctccagtttcacagctgtatatcctatgagacactctactctaacctgaacatttggtttttggttttttgtctttcttcctgtagtctatattgaaatgtgcctagatcgccttgtatctaaaccatccatccaggtctgtgtgacctgatatctttaagactccatgtttgcttcttagtagaaaaaccaactcttaaaatagcatgataaatattaggcaatatgtaatggcaagaaacatttgaaattttaatcacctaattagaaatagtctactttgtatattattaagaattccctaaagaggtaggaccgtggaaaagaaaactatataaacctcagtttaatacttcaggcaggtagctataaatgttagctgtcacatcacagttgttagactgatgagagaagggaccaagctgagaagagacttatagtattaaattaggtgtggattatagtaaattgcaataaactttgaaatatctcttcacacgtgttcatttttatgaatattgtcaagtgtcccagtcgagtgtgggtctgaactctgggaagactgctaccaagagaaagctaatgctcttccctgaaacagcattagctttgtttagatcctcatgcatgactgatgttatccatcctaatgctaacaaagttccttctagaatcagctatccaaaccctcccatttgggattcaaaggaagcaatgctattgtagtaagagcaagaatttgcatgtgtgtgtatgtcttcaagtcctggtccttacattcactggcctcaggcatgtagcttgcctgcctgactcttgaatacaaaatacacacataaagactatctagcaggaatattttaaagagaaacatgaaattgtcaaaatatcacttcccacaatgaccagttcatttactaagcttaggaaatgtctaatggcaatgtatgccaggggtataatattctgggatttaaataaacgccattaatttctacctcaggtttttgtggtttttgctgctattttttgcagtcttgttttctagccataacctacattttaaaattgtttcttgactagattgcttctcgaaacgcttcctaactcctctggcccactaacactttcacagcatatgatcacacatggagctgtcagcagcagtttcaggccagcacaggcacacagttccccatgagagttgggagctggcaggacagaagcttgccagggctctgtagctgctcctggcattgtaaatgtatgaccagggtgttgccagccatgaaggaaagggttggttccatggtttggatacaaggaagctattcatagattcaaaagcctctttttgcaacaaaatgaaaccaccacaataaagccaaaaataaaaatatgttccactggaaatataaaccacaccccaaaccagtacccctttcacccttaaatctcctacatgctggggatcttagtgagctcctagacattggatctcttttggtgaaacaactccaaggctcagaaaatggggacataaaaaaaaagatgaaatgaagggaagtaggggattcccaggtttctctttcagattacaagggaaaaaaagtctttgaactaaaaggaaactgaaagttatgttttctctcaacctcagggaaaccactaaatgtgcagctgtataatccctgagatcagctatccctgtatggccactggcctatgctgtccttacaggcagcagccagccccacctgggaggagatcctttctgttttgcaagtcccttgaccatatacgttgtgtgtgagtgtgcacgtgtatgtgtgcatgtgtgtatgggtgtgtgtgtgtgtgtgtgtgtgtgtgtgtgtgtgtgtgtgtgtgtgtgtgtgtgtgcatgtctgtgtgttcaaacaaatgagaggtagagggctttaatgtcatagctgcttcatcctgctctttcttcattcccatctcggcctcttccaggtagtcctcaaagcatcctcttcaggacagccccccccatacagacccacaatttcccagcctcagcagaccactgtggagtcagaaggggcatggaaagctggtgtgaggcaaagagcacagagcaatgcaagtgagaacgggatcagtgtactcaggattcgagtgtcatttctccacttagcagagttagcaggacagttgccccagctcactggtcctacatttcagtccttacctgtaggatggagaattatacctagagatcttagggaaagtcatacacattaacgtgtgtagatcacttagatgtgttttgctacctggttcaaattataattgggagctcacatctcaaacttggcacctctgttttcttaatcaaaattgtagagaccgtaacaacttggacacaggaaaaaaatgaagaaatgcccacttcataatgaagtatgttttattccaggttggaggctccttcatgtttctcactttgtatatattccatttatgaatacacagttgtttttgaatctctatggtatcattcagagtggaggcagaacttttataaagaatttagatgccttcagtggatcagctactgctaactcacaactgagacctttcatacccaataacaataatttgaatctcttaaactcatcagtgcagatatccaaatccttcctaatgtgagaacagaatttcctcacattaaatctttatctcaccaaacaaaaatgttaagaaacacacgatttgcagatatatgcagaccttttaaatcatataccaggcacagggctggtcctgaaaaataccagaaatcttactatctagaattatgtgtaccctttaccccccccccattcagttcccaccaccttacatgtcttatatataaagtttactaggaaaaaagacaacatttccttacactagccacagttcaagtgtgtttcctggtcatgtgtaattaggagctaccatatctagatagtgcaccgaaggaagaaagatcaacttatttaattagacaaagggaagatggtatttgtgttaggtagtatcctcctggcccaacaaaattcctcatgtgatcaagctacaaagaaaaaattttctttgtccctacagttttggatgtttcggttcatgacaaactggcccccattgttttgagacggtggtgacacagtctgtccttgtggggacatgtgacaaaagcagtcatttacctcgagttgataggaagtgaaagagaagggtggcaggagagatcatgtgcccaatatctgcttttgggaagtggccccgctgatttactccacttggccccttctcttaaaggcgctaccacctgcaagaaagctacaagatgctgacacaggggcctctgcagagcacagtgaagatgctgtgatggagaaacacagaaagctacagggaaaaccttggacctgaaaacagacctagagatttgaaactgagttataaaagaggcacgttcctatcatcagacactgtacaagttgctttcaagatacacttgtagaggggtcaagaccaggctggagaaatccacagaaacagctgacctgaataaggggttgctcgtggacctcagactgatagctgaaggaggaagtcagtttggtggtctggacaatctatggggtcactggtagtagatcagtacttacccctagtacacaaatgaactttgggagccctctcctcatagagggttactctctcagcctagagacactggggaaggtctaggccctgctccaaatgatatgacagacttttaagatcccccaaggaaggcctcaccctctctggagagaagaaagggattgggacaggaggctttgtggggggcaggggaggggagagagagagggaactgacattgacatgtaaaagaatcttgtctctaatttaaataaaaaaccaaaaattagcaggtaaaagccaaaaaagatacacttgtagaattctaaatcctgatttttgaatgacattggaaacatgctaacatcaagtccttcacaaggggcagctaagaaacagagcaggctcttagggcacagattctttttatttttgtttaaattagaaacaatcttattttacatatcaatcccagttccctctccctcctcttctcccatcccccacccccactatccctccatcccaccccatccactctccagggtaggtgaggtttcccatggggcatcatcaaagtctgtcacatcatttggggcaggacctgggccttcccccatatatctaggctgagagagtatccctccatagggaatgggctcccaaactccatttgtttactagggacaaatactggttccactgccagaggtcccatagactgtccaagtcccccagctgacacccatgttcaaggggctggtttggtcttaggctgcttcccctagctgtcaaactgggttctatgagctcccacttgctcaagtcagctatttgtgtgggtttccccagcatggtcttgatcccttttcttatcactcttccctctctacaactggattccaggagttcagctcagtgcttagctgtgactctctgcttctgcttccatcagctactggatgaaggctctgtaatggaatgtaaggtagtcaccaatctcattatcggggaagggcatttaaggcagcctctcctctatttcataggttttagttgaggtcaatcttgtggattcctggagatttccctagtgctagctttctcattaggccctaacagctccctctattaaggtatctctttccttgctctccttctctgttcttcccccaactcagctcccttatgttcccctccccctccctttctcccctcctcttcctcctaccaccctccctcctccccctgtgctcccaatttactctggagatcttgtccttttccccttcttgggggatccttatatgtctctcttagggtcctccttgtttcctagcttctctggggttgtagattgtaggctggtgatcctttgctctgtatcaatatccacttatgaatgagtagataccatgtttttctttctgtgtcttacacctgtcagaatggctaaaatcaaaaatgccaatgacagtttatcctggagaggatgtggggaaaggggaacactcctccattgctggtggaggagggagggtggtaggaggaagaggaggggagaaagggagggggaggggaacataagggagcaagtaggctgagttgggggaagaacagaagaggagaacttgtacagccactttggaaatcagtatggcagtttctcaggaaaatgggaatcattgctcaagatccagcagttccactcttagacatataccctaaggatgcacattcatagcacaaaggcatctgctcaaccatgttcatagcagcattatttgtaatagccagaacctggaagcaacctagatgcccctcaactgaagaatggatagagaaattgtggtacatttatacaatggagtactcagtggaaaaaaaaaaaaaaacaatgacatcttgaaatgtgcaggcaaatggatggaaatagaagaaaccatcctgagtgagggtacagatttttaaatggagcaatgtcgacaacttcagcccaaactagaattaggcataagttctgtttatacccccatacttggtagcgactattcagccatgacttttgcttacagccaaccagctctctatttctacttcatctggccacacaaattccttatcagctgagtgggaagttggacataagcacatctcctgtctccttatcattagaattacgataaggtttctaaaaacaatgtcataatggcttctatgtgcattgggcagtgaacccttgctcactatcagtagtctaggctgagaattaattactaaatatctgagcatgtattaagtgtcacccatgtgctgtgtgctagataaacagactataatataaccacaggtttccctttaagaagcctcagtagaggcatatgataagcaagtatgttcttaagctaacttcagatataatgagtggtacagagggacaagataggtgcaaggataggttgccttattcgctccaagtccagacccagtggagtttgggagttgttgcagacatacaatggcatgggctgcatagctcagtggctttttctgtccatattcagtcgctctagagaaggttccgaacaggaagatcattggggccttacaacagaaagttggttaaacccaagagcaacagatatgtagaaagggctgttaatgtcctcaactgtaaatccaaaactagtggaaaaagcaatgaaggcagattaggctaaaacacattgagaatatttaattcagaaactatagggcagtaagaggggcatgaagagaagaaagtaaaggacctatatgttatgtggaagggaggactatttggggtgggaaagagggtcagaaagctgtgaagagtgtgagagttctaggatgaagcccagtgttttgtatgctaatcaaaggttaatgatttttaagaaggaaataacagcagacatggttgaggccaaaggagacagaagagaagacaactaggtaacagaattaaaaggagactcaaaggctgacatagaatgtattcaaattttattgctcggagaaaacaggtttctgggaatggtcatagaaccaggtggttaaaatgttatagctgtgaaatgtaaggtggtgacaacattcatgatatgaggctggggcgccccctgcaatgcacagttcaggactcctctcgtggtttatcataggtctgtagctgttctcctaagtgctatcataccgttctgtacgtggtcctggaaacactgttcaagtcacctagcaattaaccccaggcagtgtgtgtcacagtaaggaaactaccaggtagaggctcatcttcccgcatcttcttcacagtgcatgctaaggatacacactcagcactgtaggcctggtccacatggagctccagctaacaggaccattctgaatgccttcttccaccttctttcctaacactctctcctctgggacaacacggttgttccctcttgaaacttttcatttttaaaatcttagaaccctaaagagattgttgtggcttggtttttgactcgaagaataacattttattcacctttcttttcctggtattgatcataatcttaataaacacaaaacacttagtgaacgtccaaggggaacaataggaaaggcggggacagcaggaaatgagaaaagaagaaacacatggaatcagatagggaggtggcaacagccagcagggaagaaccagatggactcagggtgtcactatgataaaaggaagaggcttggattaataaagaaaaatgactataaagcccatctgaatctgagtttctatttgtctcaggcctacaaagtctagaatcttagaaggcttcctctacagttgtgaatcaggatgtacgtgttcttttccatatgaattaacctatagaagaaaatttgagactggggagatgaatcaccatgtaatgtgcttgccatgtaaaggtggaagggaagaactgactccacaatggttatgcataaagtaaattcacattttttgaaaaggaatcacagcttgcatggaaggtgctgagatcaaagacaagatgggtttgtgactatgactggctggccctgtgtcctgagtgtgctacctggtccccctgaatctcaatgccctcatatggaaaatcaggctaatcacatccacatcaggagttcaagtgagatagccaaagtggaaacttttgcatgggcatggcacctggatgtgattactgtctgtgtgtctcctcctggctttgcccaacctaaagacaatttagtcactataggctgtctcatctgcatacagagcaaggacttctttgtgttttgtgctttgggcacacagaagtcagatgggttcacacactcatgatttccagtttccttggctgttttcccagtcggctatgtcaatcagtatgtgttcacagcagtcaccagcagagcctcatctcacagagtgtataacacaaagaccggatcctgggatgcaggtcagtctgcagagaagccaactcctccctccattcactaaggtaggaaatggagcatggcaagagagaaaatgcctgttacttttagcttcagacatggcatgcatacaggaataaaatgaccaaaataatctctgtgtctatttttaaattagtgctcagctctgaccagaatgtaagagaggaaaaaaggctcacaactgattccttttcttaacattgtccagcagggttggctctattctcatttttacttcagtctactccccaaaggacaaacccaagcatcaagagaatttttaactgtttttgcctctctccaatttcttgtgtatcatttctctttccccaaatcagtcataccaacaaaaaaaggatgtggaggatttcaagactaatttcagaagctagtttgaaacctcattaatcccagtggtctggtagaaaaatctgttctggctactgttttcctctgggaggtatatatatatatatatatatatatatatatatatattcctctctctcatcttgacttttcttatctgcagtttgtttttgttttcttttgcaaaacgtttcacctctctccaagaagacattaggatctgtgcagggtcacatagttgtgtgttaaaacagaatatgaagagatagtgctgatattatggggtggaaagaaactgctccaggactgggcagttggggcaggagatgagagtgcttttcttctgtaactgaagtagagtgtgaattacagggcttggggaaggtgattttgtcagtaacctgcctggcattcacgtgtgaggagatgaatttggattcccagcacccaagttaaaagctgggcatgcataacacattgcagttccagacctgggaaggcagagatgggtagatccctggacttctctggctagcattcctaactaaatcattgaactccaggttcagaagagaccctgcctcaaaaaataagatggagagcaattaaggaagacacgaaaccttgacctctagcatacacacacacacacacacacacacacacacacacacacacacacacacacacacacactcacacacacacacacacacacacacacataaacacacacacacacacacatgaatacacatatcacacaatgcacttcagaaattaatcaataaatcaattaataaacaaatagaaaacaggcttgaatccagagtaccttgctttgcttacagtagcttcacgtggttctcaaacattttaagtgtgcagctgagaggactgaattttatattgcatttaattttaattaaaacataaactaaattcagtttctagaaaatcagtatgattaaaattacttgaatatataagcttactttttaactgtaaattttgtgaattttgagtatatataaatataaatttaaatatagatgaaaatttatcatcagaattgatgaactctgagaacagaatacacaccagagttttgaagacataggacacattttgggtacttttgatgttaatcaaacatattgggttgatgttatttgtttttgtttttaatgtagctactagaaaagttaaatgttggggagcccttttgagggccttaccctgcctggggagagatggggggatggctaggggcagctgggatgttggggggggggagaagaagaagggattgacatgtgaaacaagcttgttcttaatttgaactaatagaaaaaaaaagaaaagttaaatgtatgtacttgtttatatttctattggtctctactttcctggtacagagaatacttgggttagaattccatgtctttccttttctagctctaagatgggaatcaaaggcgttttctagttctttgatgaagccctgcctgacagtccctactgcatagactccacgtgagatgtgactgatttcataagcaggcaatccatgaagcatccctgacacctggtgtgctcaacatatgctattattatagtttgaagtttatatttatcatgctatggggagagcaagaaactgcaagagacttaaatgtcagaatttgtctccttcttaggaaagtcttgcagcaaatgtccattccttcccgttagattctagatggacggcagatgcctaaagcctgtcctcacgatgagctgctccacttcaggtcactgcttgccgttgcttaagagtctcttcttaatcaccttcttaagaatctctaaaacccacagctaacaggtgggtgtccagatttaatttagaaaagcactccagtaaaaaaaaaaaaaaaaaaaaaaaaatgtggcaccaagccaggagagtaatgtgctctgacactgcctgatttgtatttatctgatggggttggttccccatcagttaaatgtagataataggagataaatgtgaggatttaataagcagcatggcagatagagctctataagccacacagtgccatgcctatgccaatatgccctcctttgagacccactgcagcaggatgggccacgcttcccccacgcccagaacatacagttgcttcatgggagtatccctaaggaccttcactctgcgctactttccttgcaaacttgtctgtgactaaacagccaacccctacggtgcaaaaccatctaaaattcctttctaaagaaatacaaaaaaaaaaatcagcacttatgaaataaactagtaaatcaagcagttgttcacacatcagctcattctgtccagtcaggcaccttgcaagtctttgaggaaatcagtcaccaatcaggtaagatttcttcattattattctgaaaagtgtaaatttacatagtagatagtatgcaataaggatgtgggctgggggtatgtggtaagactcagattaggtggtcacactacgtctctttgagaaggtaacattgaagcaacctatgaattacagagatgaatagaagcagtgtttctagattcaggggaaggtacacagtactaacggaactggattgttccctttagctaactgtatgcaagttcacttcactgaagtagtaaacttgatcttacatgatttctccaaaagctatctcaaaaaggcattattcttttttttaattagaaacaagattgttttacatgtcaatcccagtttcctctccctcccctcctcccctaccatccccccaaccaaaaccctacctatctcatatcctttctcctccccaggagggtgaggcgttccatatcctttgggatagggcctaggcccacccctgtgggtcttggctcagggagaattcctctatgtggattgggctcccaaagtccacacctatgaaaaaggcattattcttgactaatgaaaaatgacttgtccccacaaaatttataacatgggacttatgaaaacatgaccagcataatacacatcactgcgtaaatactcttgagcatattttttaaaaagaagaaagcaaacatggatgggaaataccataggaaagacggtcacacaaaaatccaagcatttcaaaggacagaattcacagaaattagactcccagctttaaaaagaatgctaggtggattaaaacccactgtaggcattatggtgtttacaaaagacacactgagggtattataatactgaataacaggaaagcaaagaatgtgagcatatgtatgagtcagacactaagcacaaaaaaaaaaaaacagttaggtcagttatattaatattcgtcagagaagataataagacaaatagtgtcattaaggacagagctgctatacaatgattaaacattaaagtcaccaaggcaacatagaaattctaagcacgtatgcacctcattgttaaaattaacagctctaagcaaaacttgacagttctccacgaacaaatgacaaacctactctgatagttggaaattacaaaacacttccttcagtaactaaagtttcacatagccaaaaaaagcaaaaaagtagaaaagttgaacaacataatgtcctgataaatacttagaagtacttagcacattttcaataagtctacaaaggttatcagcgaactgttttcctttgtattctaataaaatgtgacagccaaaagcaacacagggaaggagtgggtttatttttactcacagtcccaggagcgtggatttcaacaccacagggaaggcgtagcagccgacagggaaggcattatggttggtcgccacgtagggcatgaatctggccaatttcagttcttgctcatacaggaaatagcggaagagtgagacagcctgtcccagtggtacacttcatccaataaggtttcttcagaaagttccacctcctaacactaccagaaccttccgaaccgccagttgtatattcaaacaacatagttatcatatgaatcatcgctttctaaattctaggaatttactatgaaaaggaaaaataagatacaatttaaattatagaaacttaaaaattgtttctcatacttaataaactaaaagaaatagaaattaaaaagcatacataatttttaaaaaataataaatgccatgccacttgaacatctgagattatggaatatgttatctgtttagcatttcttttttgttttgtttttgttgtttgtttgtttgtttgtttgttttggtttttcaagacagggcttctctgtgtagctttggagtctgtcctggaacttactatatgtagaccaggctggcaacagacttgcagacatccacctgcctctgcctcccaagtgctgggattaaaggcgtgggccaccacctctgggctatacttggcttttcttaaatggtaaggttacttataatagagtttggtgctctgccactttcaagctaatgttacatcataggcattctgccacaccattgttactatcttttatctaggaatagctctccagtccctatgtttctttctccttcagctagaaatcaaaggccctcttccaaatataaattaaattcatgtcagtaagacacctacagaccaaggctcccagaaaatcagagttcctttttaggcgcagtctgggtcaaccctctgaacaatatattctaattcctgccacagccaactgcatgttcttttgttaaaggctcagttgtggtgaaataataataataataaaaaaaaaaagcttctattcctcagtcaagcgaaggtttagaaccaggcttcctgcagctttattcttttctggagcatagtcaatactgatgctcctttccaaccccagaaacctacaacttccatttcctcttaatttgctattagcaaaaggatcctaaagctttttctagaaaaattctgacaaggcttacctactggattccctctccacagcagcctcagttctcaactcagggattagtatatgccctaatagtttaaagctctccctcacaaagcttttcactgctagtggtaggacatgaaaatcaggtcttgagagatggaaagtggaaagtgtgattggttcctttcacttagaaacttccctagccctggccgtgtagctgagttccgagccctgctgataggaggcacgatagttatgacatcttgaggctgtgcccaaacaagcacatgttttcagtttcctttttccaacaagcctctgcagcatttctcctactgccgtgagatctcagccagagatattttagatactgggaacttcatgtaagccaaaacctcttcttttgtttcctgttaacactaggcagttcacagtctaagagacaaaaccaggccaatgcacacatttgggaaatgccaggcttgatttgaactccctgctaggctggctctgaaagtggggttgttctcctgccactttagaccccagcatgtttgtctcaaaggtttcttatctgggtgtatctagtctcccgcctccaactcagtgtgacagggaggacaaaacagcccaagaataaaaatgtggtgttcttaaaaacaaccaggtcaagtatttccaacagatttttatccatgacatttaagggtcaaccaaatgaaagagaatccagacgttcagccatggagagaaagttagctgccttaacttcctgggttgatttctgctgggtgttctaagcatccggtttgatgaagttttctcttactggcactatttgttccttatttggaaacctcactgaagttctgctttgcccaggactctctttattggaaacttcaaatgactgccctaaaggggcttccccagcctatatctgcttagtgtcttgactttccatttggatgatgctttaccacctcactgttgttttttattttatttttacttttatgtatttaataacttactcattcaaaactgaaaatgcatttatcacagctcattctctggaccatacagttgtcttatgttattactaactgcattgttttcattattctactttatgattaatggttgttggtaatctcttattataccaagtttatgcattaaactttacctcattggttgtaggaataggacaaaatataattctttgttgcatgtgatttcaaacatctactgtggatcttagaatgcatgataaatgcaattatataagagaccggaaggaattccagtcaaagctgaggaaatatcccaagtataaggaactagattaataatatcatcagacagcaagatggaaaagacagaaaatcatatcacataaagcgatgaaagtggaggagggaaactgacctgccagacaaagggaagagactgtattagtagaactcagaactacagcctcaaaactggcagtaaaagatccagtaaagccaataaagtaaccaattctgccttaagagacctgcacttctagatttccatggtcacaaacagtagtaagactgaaattgtgtctttggatgctactaggagaaaatgctaaaatatggggggcgggggaagtgttttcatccgtgttctattcggatgaagagacaccatgactatggcaactcatatagaacaaaacatttcattggagctggcttacagtttcagggattagttcattattgccacggctgggagcatggtggcatgcaggcatacatggtgctggagaagtagcttagagttctatatctacatctgcaagcaacaggaagagagtgccaatgggcctggcttgggcttttgaaacctcaaaccttactcccagtgacataccttctccaacaagacctcctaatccttcccgatgagtaagcattagaatagatgagcctatgggggccatccttattctctctgccacagagtgtcctggatatgtcttttaaaagttgcaagagagagagagagagagagagagagagagagagagagagagagagagagagagagagagagagggaacaaaacaggactggatttggctatcaagttgcttttttcttaccttagtgagagttgcttcacaaatgaatgggaacaatggatgagtgccaggggaaaggttctggcttatggagactgtagttaatcaaaatatagctcttagggaaaggtaggtcagcacatactgggtgggtggcagaaagagaagttcgtttttaatatggtggtggcaggtgtgtgtgtgtgtgtgtgtgtgtgtacatcttagacagacagtatgtgtactaatttgaaggatgaaagtcaacaaaaactaaagcaaaactaaagcccagagatcagagcaaggtctcagaggcattaagaagagatgaaagaaaggatagagcaaggatgaaaatcacctcagggaaaaagaaaaatccattcccctcttaagacagaagatgtaggcgtataggaaaaataataacacaccaagttcagcaaatatagttattagagatgtttgtctctacaactgagaaaggactttctcagataaggaacgtttttctccaggtgggcaacaagtcaagtaaagagtgagtattgatctttctctaaatcgatgggtggttcttggtacaatgaaggtggcagaaggtcagaagcaccattcagactcagaagaggggaaagtcagcaaattgaaaccatgttcacctcaccaggcttctggattaggacgacagttgaacacaggcttgagttttgtagatatactctcgcacaccccacacaataccctacttcattttctttctagtattttatttttctacgaaagacttccaacttaaatgtgaagctacaaagtagtggacattcatatacctatcatatagaaaaaaaaagaaatgttaacacattccttatttgctgatattatgtatattcgtaggtctctgtataaatttattattacatgatagaatctgggttaggtctcataatatttagcaatagtctatatttttgctatgaagaatgatttctgatgctcatttagtaccttatcacccccagaaatattaaaacaataaaaaaatgtcacctgaggtcacccaaaaccgaggacgtactcaaatttcccaggttgagcatcaagtgcttttctggtgttctttttaaaactacaatccaatcaaggctaagaaattacatttatttttatttatttagggtgtatacatgtacatgtttttgcatacacatacatatatgcatgtgtgtgtgtatgtgtgtatgtgtgtatgtagaagccaaagatcagtgatgagctttttttgttagttattctccatcttattctttaacacaggaattcaactctcatggaacttcgagttccctggttcagctagaccatttagccatagagcttctgggatctacttatcacagaaccatgctccaagagctagggctatagacacgtgctgccgtgcccagcattttatgtgtgtgctggagatctgagtgcagttccttatgcttgcacagctagcactgggctgtctccccaaccccgacacacagtgcagtttttgcatcctttgttaattttaaagtagaacagtacaaaccacatactgctttttcaatcccacaacaggggcattgtaaaaccttaaacagcagccttataaaattagcacattccccttttgttttcctgtactcatacatgcatgttggtgtaatggtctggattaagcacagatgaaacatttcaaataaagtactctcaagggatgtatcaaagtactggattgtactcttttaaaaaaatgtaccaatagtgtatcaattaaaaatcataaaggaataaaaaacaaacaatgaattagtcatttgagctattcatcattatgctgttttgttttccttccttctgagtgtctggtggctatattagtaagcgtttgtttgcgtctgtaacaatcccaagcaaaccttactgtctttcaacagcaagcattccttgctcactggtttgtgattttgctggctttgctgggctctggtcaggcatcttacatttccccagtcagaatgctgaatacagaaggaatggcttttaagggttcttcctttcctttactagggataggcaagcaaaaggaaaacagaaagcttgagaacctcaacttggggccagcagtcttcactcacatccataaagcatcagacaaaggaaatcacagaacaggtagatggaggaagcagactgtgcccttagggaagagcagaggagaaaactgtgtcttaaatttgggcatggccatataactcatgtgggcccatgaaacgggaactattatatgaatgttccttagttcttccctttccactgccagagggagcagcagcgttctaaattcatctctgtcactttgcatccccaaatgaagatgtaccaacctgccagaggcgcagaatgcaagcaagaaataaacactcaagttttcagcctctacagctttgttggctgttactacaacaaagcccatttagcaacaaacaaggaaaatgctattgtttccactaaattactaatttccagtgtgggcatagccataatcaccactgtgcccagctttccctcctgccattttctttactcccaactaacctaccacagaatagaggtgatggtgaaaagggccagttatgttagtgtctctataccaaccaggcaatatcctctccattctaattcctgaaccaaattaaagggctagatcaatcttggagcactgcggtggctggggagggggatgacttcaagaacagcagaaagatccagagagagaagatggaccctggctgtgaccctggttatggaaatgctggtgatgtgtgtcacaatgtgaagatgctcagagaaggcaggacctgcataggaccatcactaagagcctgatggcaggatcaccacggtctttatcccgacgtcaggaaacaacataggtgacaatggattcttattcggctgtcagtgcccaatgatttgcttcttaagttttagttgtttaagttagcttacaaagtcctggctttcatcatggccattttatgcatactttcttcttattggttctctgtcttcactcctgtcccctgccacccaattccttcttcccagtaccttctcttcagcttttataccacatgcattatattgcccttttttcactaccatcccttaataacatcatttcttccccctgcaaggtcccccttctacttccaagacctccccagcactcccacacatacttatatgcaaattgaaaaccaggatccacatataagagaaaatctgcagtatttacatttctgactctggcttatttaccttaatgtaatgcttccaagttgaatccatctttccaaaaatgtttttcttgagagtggaatgtagtcccatgtgtgtatgtactgcatagttttttttttatcatttcatctattaacggacatctaggctgatcccatttcttagctgttgtaaataacacagcaataaataagggtgtagaacatagccactaagaaaatgcaaacttaaactatttttagattccatctcactccagtgagaatgactgatgtcaagaaaacaacaacaaatgccagcaaagacacagagaaagaggaacctttctcattgctatggacatgtaagctggtgaagcgattatgcaaatcagtatggtggaaactcacaaaactaaaaatagaacaactgttagaagcagccaccccactcctgaatatttaactatggatttacttctatgcaacgtttctttacgtgacaaccataacggatgggtcccatgactatcaatgatgaggcagagaggtctcgagctcacagtaagtcccagagattcaagaccaaagattttcggtctgaattgggctcatcattgaagcagaatccttctgaagcaaggcgatttggccctagagagtgacgggattattctaggtgtgtgagattctgggctacctctctctaatggagctggtgatggacagtacagagggaatccctggatcttcccattccagtggaaccacataacccctaaacaactgtggagtgctttcttgtttagaaactgtagtcttattcaatattatattcagataacatgcagtggcacctgatctatgtataaactctacaggatcccatggcaaataaactgagaaaattctaaagaaatggggaaatgagtcagtttggtgtaattttgcaatctcttatttttttgttattgttttcatttgtttgttggcttactttttatatatgactttagaggcacaccatcccccaccctcacaactccaaggtgctagcttttcctcctagctgaacatttaaacctggaatccagggacacagcttggagttaggcagaaatgactctccgggcctcctgtgccaagtttacaaaccaggtaatgactgcagggtgttccactaacaactcccacattccaagggcactctgccaatggcaaagcaagaaatgaaaaggaaaccaatttcatggaagtaaagtagtgtgaaagctctcttcttcttggctctcaatttaaaaccgtgtcattaaaacttagggcctcaacaattacaccttttccacatccagcccaggaactgcagccaagtgcctgcaaacacctgtgttggactcctaccagaaatgagctccttgcacacagccaaattaagcaggaagaatgaattaataaagtgcccacctttctctgttctcattgctctcaatccacttgatgatccacttgaagatgtaaagtggaaaatagaaagaatgcaacaaaagaaggtaaagatcagggctataatttttttattagttcaaattagcaacaagcttgcttcacatgtcagtcccttctccctctccctcccctccccccaacccccacctgccccccaccactcctcaggcagggtaggccctcgatgggggctccccaaagtccaccacatcatcctggactgggcctaggccctcccccatgtgtccaggccgagagtgcatcccttcacgtgggatgggctctcaaagtcccttcttacaccagggaaaagtactaatccactaccagggccctcctagagtgcggaggcctcctcattgacatccatgttcaggggtctggatcagtcccgtgctggcctcccagacagcaatctggggtccatgtgctcccacttgttcaggccagctgtttctgtaggtttcaccagcctggtactgacccctttgatattcattcctttctctctgcaactgggttccagagttcagttcagtgtatatctgtgggtgtctgcctctgcttccatcagccactggatgagggctttcggtaggggtcaggctggcccagggctataatttaaaaaacaaaatcaagaagatcatagatgaatggaacagagtcactcaggagaaaatctgctaaccagtcacttaatactattccagaaaacacctagaacccaaccccaccctcccacaccatacactgagcttctgatcatattcttactggatataagtgcttccggtctgttgactcagattgaagcagagactcagtttcctgcactcatgtcctttggaggaatagtccctgacaccagaagccaaggagtgaacaagaaaacaaagaagggagaaatcacatctcatgtttctttttaatgcccttgccctataaaagtcacatatcctattcacccatgctggtagcatccagccccaactactgccaaggggactagactacatagtccctagaagagggctgtgtgccacttgttggtgcatcattagttgtctaccccagaatagctctaagagatttggtcaggacactatctcaaaagccacttctttggagggaaggggagatactgggaaggaattttaaaacttaaagtcccataggctatcatctcttaaaacccttagacctgtataacatatcctaccatgagacagaattgtgaagctgtattcaggattttagggctttcctggtgacctccaggtccatgggcccatgcattttatggcagttttgtgacattctctcaggaattcctgggtagccagctagacaacagctcagatgtccactgtgaactgagccttgttttcaatagtatctgcaccttctaattaacctgaagactataaggattttaagccccatgaaagtgatttaatcacattgttagagtccagtgttggtaggcaacttacactttgaggacccatcaaatcccagtacatggaaggctgtatgtgcccaagcaaaagcaacccaccaaggaaataaagtctgtcattacttaattgattatagccctttaaaatctccgtacaaataaaactgcaatcatgaaacataaaaagcacattgttctcattttcctgatgagaaaaccgtgacttgaacaaactacaagttttcctggtgccagaaggctgaagactgaatccaagacactgattgctaactcaatgtcctcacacctttggaaaaatctagcccatctttgggatatctaccattttcaaagatatttttttaaagctgttggttttcaaatatcttcaaggaaaaaaaaattctgtcatctgttctccaacctggtcttaggcttgaaattcttttctttcttatctttttgagatgtccatgtttaggttttattcctttttgacctgttttctgacagtcatttatcttagaaaacacacctgattttgactaaagctgtagggattataggattgcgggtgtttccagtcaccaaggattctagccacagttcttgtagtttgttgtcattgcctccttccctcgccaattcacagtgctggtacctcactcttctccattttctttaactctgagaacacagcaagcattcttctgctgcatctgaaaggcagtggggatgcagatgagggtctgtggcattcatggcctgtacttatgaggtgactcattataaaccacagattaagaacaacttccttaaacttacagggccaggccagtgtgtaaaaaccactaactctgcttagggcataacctgacatctttatttccattttacccattctatactttgttcaggaccattcctattcctgcctctcaatgcaaagattcttttcgacatttttaatgacctctgacccttttcttttcataagctcatgctatcttctagaaattctctaataattgaagccttcataacacttcccctaaaaatttaccaaattagagctgggtgttgatggcacacacctttaatcccagcacttgggaggcaggcaaatttctgtgagttccaggccagcctggtctacagagagagttccagaacaggctccaaagcaataccctctctcgaaaaacaaacaaacaaattatcaaattaaatactttaaagtttttctctatgatattttgctcttctaaaagtgaaaatgaattatggaaatagagttggcaaactgtaagactaatccagcctgtggcctagttctctgagaatccagcctgtggcctagctctttaaggatccaagctgaaaatggcttttacgtctttaaaagaactgagaaatcaaatcaaagaatgtcaggatgcagaggagagcagaacgccttcatgggaagaatttgccagaacctctcctacaccgtatttagccttccctttagtccttctctgttgctggcttcaataaccattctttaaaaatgctcccaagtttgctagagtagacaatctaggattcctgagtgatgaatcacaaacagaacctgaaccctaaggcttgtaatgtttcttgtgatgtgatatgatgtgaccagagcatctgagaacttgctcatgacctcctttgcatgccccatatgtgtgtgtctgtgtctgtctgtgtgtgcgtgtctatttgtatgtgtttgtatgtgtgtgcctgtgtgtatctctctctctgtttgtctgtctgtctctatgtgtgtctatgtgtgtgtgtgtgtgtgtgtgtgtgtgcctgcacaagtgtacacacgtgtacatggtgcatgtggagtatctggtgtcacagtgaacaactcctcaaaccacacctttacagtccctctgtgtttctctactggaaacccagcacatcagtgctcatgaagagaggaagacatggcacacaggtagggtaggtaagtgggagacagcagcaagggcaggcaggaaaagaggtctgaaaaatgtctgccccagaggctgtcacaggtggaggaaatgggcccttctggtgtaattgtcctgccaggggagaagctattctatttatttatgcattgttattttttttttaagacagggtccctctgtatagccctggctgtcctggaactcaccctgtagatcaggaggccatgaactcacagagacccacctgactctgtttcgtgtgtactgggattaaaggcgtttgccacaaccacagagctgagagaagccattccaaaagaagacacctgtgactccacttggctatcagactacaaaaacaatagatccaatgaattaaaattttcctaggagtctcaagctaaaggaaaggaaaggctgaagccagaggaggaacttgcctcctggcaagagggtttcacacacatctgatgatgatacaaaccaccccaagggacaggcagtgatgagcacaggatagacaggaccacactttgactaggactgcttagctttctagacctcttgctttctttttaaacctaaaccttttgtcaggatcgaaaagattgatttgggagttccaagaagccggttgtttgctttcccatgatagtcgtgcagaataaatcttctttccctggtttccactattacttgtgtctttaatgggtattttaggaaagatggctgagcctcgcttgttgggcttgccagagcccaggctttgactctcaaatatacagcaatgtaagtctatgtattagaaacttgttcattgttacacacacacacacacacacacacacacacacacacacacacacacacacacacgcacacaccaatatattatatttgaaacaggatctttctatacagcccaggttcacttggaaaccatggcgatactccttttgtggcctcctgagttctgggaccacagacatgaggtaccatggccgtctgattctcttacatttgaacaatgcctcctctctccttgtgaatcccctgttggcagtgtgaagtgagacctgagaggtaaggatcctgggaggcagtgacaatgggcccccagggatcagggcattggcatgctggctgtgcagccaggcctgactgtttctcccggtggaatcacagaacctgagtatgttgtgagctggtaactgcacatcttgtgaaaggttccactgaaactcctgaccacgatgggaataaatatgctgtgtgccggcaaagcggtatgaggggaaaatgacagactacacacctgagtaacctttatagccaatacctacccaactgcaggcacacactgctcatagagtaagtgaaacttgtactcaaccagagagagtggatttaagagacaaatataaaaacaataacaactatagtgtcaaggggaaagatccttgcaagcccaaaccattccttctatcagaacggaagaagtccacatagctatttttattgcttaataaatgtttactgttgttttctaatgtaaagcttagatagaatgaaacagttattcatggtcccatggttacaaatgacaaaacaagaatatatagtctgggagagatggagggaacaaacacagatggtaccagatagaacagcattctagaaagtgctttaatttgctgcaagtgactcactccctgggcttccatttgttcattgctaccattgggacggttttccaggggtcttgtgaggattggggaccacttctactgacaatggctcacagctgacctctagaaggaaggaggacagacagaagacataggtactgggtgtttctgcttcaggaaatggggaagtcttgccgtatgtccatatccatttagactagggaaagagaaaaaaaaagaaaaactcaatcagtcctacccaaactataggaatcccaggctactaagcatttcaacactgaggctaggaattctgagccaaagttttgcaaatgaattccctcccctccactgttccatgaatactaaaactcttcaaagcttggaaccccaccccccacactttgctacttccgactttgaatctcctatttaaaaattattttcatctttcttgaagcttcctgagcatatttaagtggcaaagaaaatattttcagtagtttccagtctgaaaatgggagtcagggaaagcaaacaaacagaaaatgcatgcccaaatctctccagcctgggagtttccatgctcttcccacactgtggccatctctctgggaggttactaggtgagctctctgcctgaactttgcaaagtctctagtgttatcagtaatgaagacagatactaaagttgtcagaatcactttggaaaagcaatgaaacatctcctgaaggaattgagcaggaatgtaacccaagacctgtcaatcacccacaacctgtcaatcacccacaaactgtcaatcacccacaacctgtcaatcacccaagacttgtcagtcatccatgatctgtcaatcctatactccagatcaggattatttataatctgaaataatttaggagataaaagtagatcccagcaacattatttatagtgaaacaatgaacaaccacctggaaataaatggtttatccatccagatccgaatgtgttaatgtgagagctggagacatggtttgacagctaagagcacatactaccctagctcaagacctaaattcagttcccagtatccatattgtgactcacaactgcctgtagaatctgacacctcttggcacacacacacatgcatacactcatgtatgcatgcacacacacacacacacacacacacacacacacacacacgtacacacacacacgtacacacataatttaaaaataaaacaaatctttaaatggaatttgttcataaactgtggcatattcataatagaatattatacaccaatgaacttacactgaaggacatccaataacatgaatgaatctcaaaaatgtaatagtgaataccacaagaaaagccacagaatcaatgagcctgggctcacaggggctcacagagactgaactgacaactggagcctgcatggactgacctagaccctctgcgtctgtgctacagttgtatagcttgggcttcttatgggtcttctgacactgtaagcaggggctatctcccactctgttacctgttttggggaccctttccttgtactgggttgcctagtccagccttagtaggagaggaattgtctagtctcactacaatttaatataccatagctggttgatatccatgagagcattgcccttttctgaagagaaacagaggagtggatgaaggcagggaaggggatgtggagggtgagaggagaggagggaagagaaactgcagttgggatataaaaacataaataagtaaaataaataacaaaatgtaatagtggaaggaataaaagaacctcacagaagaataaggttccctttgcataaaattaacaagcaaaatgaagccatatataatttgggtatagctatatacaagatagaactatgaaaaaagctaggagaatggatagttaccctggggaccaaggcaggaacaaaattagagatcagcccaaaagacttcaaaagaactggaaatagtctcattttaagaagactggcaggatcgtgaatgtttatgactgcaattatacttttaaactgttcttatacctccacatacttgagtctatatacatattaagttttattattgtcatgtatgtatggtgtatacgagtacaggtgcacatatgtcacggtacatgtgtggtggtaagaggacaattttcaggagtcaggtccttccattctccacaggtatcaaggtttgaacacagaccatcacacttgaatacaagtcttttgacccactgagcaatcttatcaacactgccagcatcagcctcaactacaatagtctgaatgtgtgtttgttccagaaattcagatgttgaaaacctaacccttggcgagggaaacttgatggtcttttcagtaatgaaaatataaaatcgatggaatagctttaaaggaacaagatataactctgtggagatgaacagtgtagcctatgactcagcgattctgttccctccaggatcccaaatggaatcagagtctatatgcaagaggcacaaggcctccctcccactatctgaagagccagcaagactcccgaaacaaggcctcactagacaccgaatcactgactttggacttcccagcctccaggactatgagaaataaatttctgctttccataagccactaagctcatggtattgtgttataggagtctatatgggccaagacaatgagaaacataaatttatgaaatattttggaacatagaaatgcacactatacatcgaagggcacagggaaacataagattttcccatagtgatttccaccctgccacttcctatgtctgcctcgtgtgtgtctgtcttcccaaagcctcttaaaagtctttctataggaggcagaggcaggaggatctctgtgagttcaaggctagcctgctctacagagtgagttccaggacagacaaggctacacagaggaaccttatcttgaactccctagcccccaaaaaaagaaaagaaaaagaaaaaaaatctttctataaactcataatcactttttctcaccctacagagtcaactgctcttaccagttctttgccccaaaatcgtgatttgaagacatgtaggtagacagatgataggtaggtaggtaggtaagtaggtaggtaggtaggtaggtaggtagatagattaacagatggatggatggatggatggatgataaatagatagatagatggataggtgatagatgatatgtaggtagacagatgatggataggtgatagatgatagatagatagattgattgatagatagatagatagatagatagatagatagatagatagatagatgtggtacttttttgaatctcatcaagaagctattgacttccacaacaaaatactttcagacaggaaaatgcattgctgagtagaaatctatgcatgccaaacaggaggagagtttcaagagaaattcacagagaagatgggtgttgagtgtcttaggaatgaagaaaaggagatccaataacttgtacactcattcttggttggtgactttactcttgttcaggagggaaacagaagacctggagtggggagcccatttaacgtgtcagtgaatctacaagcagggattcaacttctgcttcctggctctgttccaaaagggaaagggaaacccctcccaccaaaagcatcatctttctcagtcctcatctccccctctcttctttaggcctccaactacctctccccgggacggatctctccactggaccagaacagcttctcttcccaggctcccgccagctccaggccttctccagccttttcctccatcatcaccagccagtctcacatcctgacgtctatgtgaaacggtttttaaaatgaggagttcctaggtctccttctgagatagtcttccttcctcattccacatccttttaacactcctaaaatatcaatctcctctcgacaaattgactgctcctaccagtatctctggcctagatttctcttcagagtccctgggctcatttacccaattgatttcctggtctatctacttgcacttcttagacacctcagattcagggtgtcctctgtgggagtaacctcttcattgaacaccctccaacgcccctaccttcacagtatcccttatttctcacctgctcgaggcaggaatcacgccacacactttccttctcctatagtctgtttcaacagtcttatcccttcaacatctgaaaaacgtcttagactcacttctctccctctctccggcccaactcgcatcagataacacacaccttgaaatcgatccttaatccggcttcccttcagccactctccacaattcagcctgaacaatctttctaaactataaacctaagcatggtcacccccacaaccacacatgaatgtgcacatgcgcacagacaaagagacacagagacagaaagtgggacagtcagaaggacagacagacagacagacagacagacagacagacagacagacacacacacacacacacacacacacacacacacaatttttaactactagtatttgtcctggggtttaaaacaaactcaatgaaaaacttagcagcccccgcccctcgatctctccatcagatttcaacttcacctcagggcctgccttgcatgtctttgttctaactttcctgtcacttcttctagaaagttctctagcacttctagaattccccgtcatgcactatgatgacttaatgaaacctgtcatccatgctacacctctgttcagttaggttcaggatcctgctttgtctcatgacctggtgcctcccaaacccctgacccagctcaggcacctcacaaacactgcttaagtaaatgaatcgttgctcgtttcccttataggatgattcaagatattttgtattggcacttccctaaatcctgcaggcatcttcctgaatgtgtatatttaaagtgatcataattaagagttattgactgaactacaggagaggaactaattagaataagctatccctgatctctctcataggctgaaaaaaattgaagcaataaataacttaatgaaaatctagaaattgaaaacacttgagtagctttatctaaagacgtgagaaaacggtttttaacactgttctcagggtaagacagaccactttccagggttgaggcctcgtgagattccacctcccatgttagcatgtctattggtgtcattgttcaggtcttgtttagacagccatgttgatgagttgagccatgggtgtatcttctctggcatttctagaaggcacagtcgcacagtaaacttcctgttcctctggctcttacaatctttctgcctcctcttccacaatgaggcttccaccccagacaaagaatcacagacaactaaggaattctgagagtgggagaaatagatctccctaggaaagagccctggttattcaatgctaagtggtcatccctgaaactatagacatacaagtagtaaacattatgcggactggagcaggttatattttatattcataatatatttaaataatataatacatcttttaatatgatatttattagagaaaaatacatcataaatttgaaagagagcaagggagttcttgagaggggttagagggaagaagtggggggggaaacgctgcaaatatattttattttcaaaaagtaaaacaaaaattaattaaaaacctgagataaaatattttaagttataagcaggctatagtgccttatacctagaatcagaaggctgaggtatgagaatttccaagagttcaaagtaaaacatacatggaaaagcctgtctcgataaaataaaataaaaccatatataacaggctagttaactgaaggatcagcttggacaagagatgaagaaatttacatgtagtgtgcctaatgaaaatgaatttggtggtaaaatcagggagacaaaaacatatacatttaagaaactgttaaatgatattaattaatagttatgaaggtagattctgcattatctgtggcttataagtgtccagccattagcatccttctctactctccatttcagaaaattgtggcattttatcctttccttttacgcagcacaaatgaggttgaaaggcaagaaatatatttaaacaagatacagtatttgcctaaaagaacaagatcaagacagaaaacatttaacattactgctttgatccacaaatacaaaccagaaacggatatctgaaaaaactggaagttagaatttgtagaagaaaatgctgcaggcaagaacattgacttttccaagaaaatagattttaaattttacttggaagagtaaacactataaaggattccagcaggtggcgctctgaacctattaatgagctcagacacacttaaggactaaaatccttcctttgtgtgacatatgtattctgaccacatactccaaaaatgtggagtccacaccctctgtaacacacacgagagagagagagagagagagagagagagagagagagagagagagagagagagagagagagagagagagagagagagagagagagagctgcagtaagaaatcaagtaacatcgctaagttatgaagacaaacaagctggacatgaaaatatatgcatacaggtgcacagattgaatgtgcttctaacagccaatctatcttctcccaatggctccttctactactcagctatgttatctttgcaaccgaataacagtctgaatttctatgctttcttcaaacattgagcaccttctcctctgggctcttttgctcatttactatgaataaagagagcaggaacatgcagaggagttgccagccctctatgcacatggtcagatgcaatcctctcatccctctgcaaatccatgtgctccttctttccccccaacgacagctcaaagggctagacctccagttacccaaaggcgtgccttgactggtgctcctctgatggctgctcctgtaaatgtgtgctcctctgtaaatggctcctcctctgtaaagtaggtgctcctctgtaacatagattctcctctgaagggtgctccactcaccttctcagaaacctgagctgccatgtgctgtttaatttctctgtcttgaacttccaaactctactcctcaatggttttatctctaatgcttaagatatattcccatctctcctactaaaatacacatgaaataagtggaggtgtatacataacaagtttggccatgagcccaacattgttgaaactcattagtgatggcatggagttggggctcaaggtcagagtgcttgtctatcgtactgggcctgggttcagtctcgagtactctaatggtaaatagatagttcgaaattcagtggcagctatagtggggttttacaatattcttctagctttgttatttattaagggcaaagtcccatgatacagttttaaataagcaagcctcatcagacgcctcagctttttctagctgaacccttctaacttctaacagccaaactctcaagagcttactgcatgcatgcatgggctcaatttcttccccctcactgcctctgctgtcccttccaatctcatttttactcctgctccactgcatcttaatatcacccatcaaggacctccaagtcactttgatggacatgttttcattatcgttgagttgacttctcagtagcatgtcacactcagccatatcacatcttaaacatttccttccactcgtccagccacagcactgttgcttcctgattgtcttcttccctttgccagtctttctctagctcgtctctactttgtcattccaggctgcagttccttagctcagccttaagtcctttctccatagagaagtgtgacattttcccttagctatctcaaaagtacaccaaaaacaaaagctctgaatttaattaattgttttttccctttattagattagacctcccccttttattagattggaaagtggtacataataaaactggagcccttcttgtcagctcctacccttctataccatttccaaaacatgaacaactcctgcaatcttgcttcgaagataccactaggtcacctgcatctccttgtagccaccatgagctgttaattcaatccaactcaaagtggcttttgctgcttttggtggggttgtctactgtgttcccagcatggctcctggttattgtttgccctattctctcagcaatcgctagggaattagttctaaaacacaaaactggttgtcctagtctctaacttcagtctctgcagtttttccttcccccccccttttttgagattaaagggcaaaatgtcttccagggaacccctcccccaggaaccacccaggatctttctctttattctccacctagcttcatagcaaacctcctccctcaggcctcgtagtcaaataaagttgttttccagtcctttacatgggacattttccctcctaccacaggaccttagtatgtgctattgctatattgaggaagctttttttttcattgttagcctggccaattcctgtttatcacttagattcaagtcaaggggggcacatcctcgaggctttacatggcctctaaaaaagtccactcccccccaccagccccaaacaacctctctgccttcatagggatctcctacatccacagttcagtttcaaattctgtaatgtgtacatgggataatcttattaggctcattactgtacctggcttgttattttatacctagtacatacgaaattaatgtttgttggatgaataaatgaactgatgcttatttatatgaacttgtgggttacttgccacctaacctgtacttagacacctttcctttcctctccaagtgggtgctcagggacccccaaactcatttgtgcttttgtaagttattattccaggaactgttaggagacatgccaggtatcccttctatgccaagatttgagatcaaatggtagctatggacctcaaaaggacagataaaatcaaggagaactcaaacctgtactaaattatcccagaagtctaagacttcagagaaatgtgctctcaacacaggtccctttagggcccactgcctgaaacctgggagtgagcaatcactctcttcttccattagacacacatttaagtaaaaaattaaaaagctctgttagaagtttgtacatagctggaaaagaaaaaaaaaacctttcatgtttgctcaaaataaatttaactggttctaaattgtctgctattttaggtggtacatttcctgaaaagtggtctacagaggcagccaaaggaagacaagattattaggggttgttagcggctcccaacagatactctactgagcatcagactgagccgaatccatggcagggaattctccagaaaggtccctggccagtaatgcagctgccaactcctcgtctcctgccagctccccaggcatttgcttttagcctaattccacgtctcaagatacctacttaccttctgtcgacagacatacctgccctcctacctcactgacactctgagaaggccttatatgactttcaccataaggcctaggaaacccagcttccagggtcagcataaggactgttatactgaaactctgcttgcacccctggagtgaaatttggggagaaaatattcttggaatagaatgactctttaaaataagttgtacactcctttatgtctacctgaacaaaaaaagcaaaagcatttccaagatccagattcttgattcccactaaatcccacaaatcctcagtacacacaatctgaagattggttgaaggaaccacccataaataaaagaaaaatgaatgtgtgtgagcctttatggtgcaaccaagtatctagacatgtttatttttgccttatttaactctgtcttttgcacaggccattttttaaagtgagcaaatggaagctcagagagatctagtgtgtgtccccaaggaaatagcaaaccttgagattcaaatctgggctgcttttgctgtgctcacagttttcaatttatcttattctaatattccatgtcttgtccatttattatctcaaaagatccatcactgaaaaatgtcttcatcacaggacagaaattttgcattggttttgttttgttttatgatttaaccagcctctaaggatggcatagagaagttaaggggatcctatcccattgtaatttcaggactgttttaagaataaacgttccttgtatttttttgtttgtttttttcttccatttctttaaggggttttctcatgtcctctttgaggtcctctatcattttcatgaagatgcttttaaggtcattctcttctggttcatctggagcatcgtgatgttcaggtcttactagtgtatggttcctagtttcaggtggtgtcatattgggttttctgttgttggatgtgcttttaccttttcctatgataggtaggattttagtggggggggtggtagaggaggaagggagggagaagggaactgggatcatcatgtaattcaatcttgtttgtaattcaaatatataaaaaaataaaaaactaaaaaaagaatgaacattccattactattgattacaaatacaagcagaatgaacatttttctcttgtgacaactattggatgccacagtgacgtactctgatgtctctgcaaaactctgggcccgagcagacccatggacttgcctgcatctcaaaccatgtctatcctgtatcaatagccaaaattaacctttcaacttgccaatccacatctctgctgaaactcactatatgttatcactagcccataggaaagcctagccaataagcctttgtcagtatttatccaaggctctggaattgcccctcaaaggtattgaaagtttgataatttcctgttgtcataaggaaaggggaaccactactaaccatacagacaatggacccctgggaatttcacagagcctttcccttgtgatgtacttctctttaatgacctattaaagtgtattggttgatagttgagcctaagtctataactcattcttatacattagtccttgttgtctttatagtttcaggtatgtccaacccacagctcactggcttcatgcacccagcatagctatcaatacagcacaacacaaaaacataaacttatctaaatcattgacttttttagcaattttatttttgttgtggaactcaaccacatagttctagagatgaaatttgtggctgacagcatcacattgcattgatgaaaggttgagtatgcctaggaacttcttaaaatttccaggaattcacactaccaagtgctactaattttgaaaaaaatatagtacttcattttggtaaaaatcagtacaaaaagatgttcattgccttgggaaatcaccgttggtattgttgggtattatgtcccccatagctacgtaagccatcggcatgccagcactgctttgcccatgtggctgttgcattcaaggagatgcttcgtgatggagagactacaactgtggccttcacttataaaaacagtattacaggtgcatctcccttttatttcttatgctacaattattaggacattctataggtttgtttcagctacctgattagcaaggttatattgcctctaaattatattttattataagaataggaacgctatattacctgtgaattttatttcaggatagtagcaaggatgtcagaaaatgctggatttaactaggtggagtcagagtggcatcattcagtgacattcccactcttaatatctaaactcatctctccatgtcaccgcactgacctttggattttctgctcaaactggactcttaggattaccgtgtgtgctcaaagatgaactgtagtccgtgatggtaagacttctttattcaggtaaacaccagagcaaaacgcaagccagagcgagctcacaggaagcaagctagcatggtcagagagaaggggccagggtctccacgtgcagcccttaagaaccttcccttacgtcaccccgacttccctttaccctgccctcatgggcgagtcccgggtccacctggcaccgacatgtccgggttgccatggggtggggctagggtgtctccctacactgaaccctccctaagatgtcttgttcttactatctctttgtgcaaagtcctggtatccaaatcttatataattcctcttcattcaaatactcactcagatatcaccccctccaaaaggtccccccaaatcatcactcttcataccactctctaccccattcatccctaaaattccttcatagcacccatctagcctcaaattccatggtaatatttatttacctatcatttgccttatcataagaatatgcatctacaagagatgtgggggctgctatgctggatgcaagtacctggaatgatgggaaatggtgcaaagagagtatttgataaatactgttaagaaaatgaattaatgcatgaaggcattgcccatgttcctgcttcctaggagctaagaagaatcactttctggctcctatcttcataactcatagccagtctaaatcagcattaattctttcaaatatatccatcaaatgcccagcatacttcaggcaccgagaatacagtaataaataagacagatctacccacatacttcgcaattaataatcagctccagtacctctaaaacatttgagccacacagtgtagtgaggttatatataaaaaaaatctgtttcattttgtattttgagtggctttgaaatgcaatagttataacattcttaagttggaaattttctctcatgtagtaagaggaaatttgttatcatatacagaagaatttttaatcaatgtagaaaaatattgatgtccttcaggttcccaaaacatcacccctcaggggtgggcatatagagccaaaactaagttaagtttaagtatgtggaaacttctgtatcctttaaatgaactgcctagcaaatatccccacctagctagctgagaaggaaggttcccttattggagccacagagggtcattgtcttcaaaaagaccctcccagctaggaacatcctgttagttctctttcctaggtgtcccaaattagcaccagtgtcagatgacagcatgaagaagtgaatacttagatccccacatgccatcactctgtggacaggcatccttcccacatgagagagagagagagagagagagagagagagagagagagagagagagagagaggaaaatactgtaagcaaacagagtctccgtatttgtgcagagatacacaatggactttctcattgattttcatacttgtaggaaagatcatataaccttgtctataaataagcaaaataaagttcagaaggtagttatgacttatgccaaggtcttcttattacaagttagaaccagcaaggaaaactcaagtcaagctagggacatgggacttcaccaaaggagctggccaagcaatgaacaaacccccaagcaaagcttacttgggtacacacaccttccctgatttgactcttatccttggtcattaagactccaagacatccaattatcaatcttgtgaattttctagatatatgaagcttaggatgatgagggatgaacccatgtgcttgctctgacattggacagtgcacatggaaacatcctccttccaccctctaaacttttactgttgctaaccagtgatatgagacagagaatgagaaagacatatgtgatactaagattgtggttggaaaatataactcatcccttccctaaactccctccacttcctcatacccctttctccacatacactaatattttctttcagcttagatttcaaagcaaataagaaagaatatgtcagtttaacaataaataaaacgctccatgaagggatttggggagaatttctggtctcaactttggaccccaaaggcattctctaagataactcagaaaggtgggtttgtgttggctctgactacaagactcttcagtccctttaaaatatgactgcttcaaaagatgggcagaagtttcaacttcctgcaaatctgcccatttcagaagagaaagcacctgcctctatccacagtttgattctgtattttcagtacctcaccccttaacatggtttcattacatctaaatatgcaccttccttcctgccccaactcagagtgcaactgaataattgtgtcctctggtctccttcccaagaagtcccacatgggagagatgctgactctcgccagcaggcaagggaaggtgtcttctcagatttctcaggatcacctgaggtggaggtcagttcttggcaagggcagcgccatctagataatcatatagagcagcagcaatgtgcaagggagggagccaggctggctccaaatagaaaccccagctacagcccagtcagaccaggctcccaatgtgcttggatgtagcctgtcagatgagacctggaaagctggcagaagttaatgagggatgcaaggaggtgagcaaacagcttgttggaaattgtaaagatgacattcacgtgcagaaaggtaaagcacaacaaacttcacattaaggagcacttaagggagacctttaacttcctggggataagctcagccaacttgctcctggcaattagttgactgtttcgtagtttattctactaagacaaagagcagggcatggctacatttcaccttacagatggatatgtgagtggtgagccattgcatccaaagtgctagggatgcaaaagcatagctgacaacgagtgtgcgaaattaccctttgtatgaaccccagctgtcccctgaccctgaaaggagcactttggtcaagatggatattatcttagagaacaattggccatttcctttctgcatgtgggttgatctgcccccagcattctcagagagagaagggaagaaccaggcagttataaaaacctgtggccaggcaccttagttattttgtgtctattatatcattgtaaggcaaaaggattgtatcagctgagaataaagatgcagcagacatccaagcttccatcagatgatgaaaatcagccagggaggaagggagaaagaatgaagatggagggaggcaaagggaagaaaaggtctaggattcccaagtaaaaggcttttgtttctctcctcagagcctctagggaggaataaatataattatcaacctaacatgacagcattcaaaacaaaagaggcacatgccaggtgatcatctctgccgggactcgaacccggaacctctggattagaagtccagcgcgctcgtccattgcgccacagagacctcaccacacacacagcatcagcaccagaactgaaaaagcacataccttctgcatcaccgagccatctcagcatcctgctctctgagcggtgggggggacagggacagctggaaaatctggagtggagatccaccagccggctccatcaaagctttcctcaatattgtgggtcttagattcctccgggaattggaagaaagtgacagcagtcattttccaagtcgcaggatcgctgaaagaacaggacagagcaggagcctttgcttgctgttgctctccatccctgagggaggataacggggaaagtctccctattctcatgctaatgaagcagggtacacccagcccggaggagaaggcagaagccatctctacttccacccccatttcctcactgtggtttcatcctggtccagatattcttaggcaagggctgggaaagctgaaggcttcaggaaaagcccgattccagagacaaagaatctactgctataaaaaatcaccgtagcagcgtcagagaaagtcagggatgccaggcagggaaactggttccttccttggcctcagctttaagaactgtatctgcccagagaagaggtccaggagtctgatatgatgctacttcaataccctcgctagaactgagaatggagaggggagatggaatcagaaaagtgtatgtatgtatgtaagagtacatccttatgtagctctctctctctctctctctctctctctctctctctctctgtgtgtgtgtgtgtgtgtgtgtgtgtgtgtgtgtgtgtgtgtgtgtatacagataggaaagagtgaaaggtgaacgtggcagttctctgatgaaatccaggtggccttcacacagcccttcctgagtacatttgtcccttcccactccttctctggctccaagtcttcccagtcttttccccctaatttaagcaggggaagatttctcagctgtctgggtttgcttgaggcatactagtataattaaattgaccagccctgggtaaccatatgtaaagacccagcttggatccaagaaaatgtttcctatttttaaaagcctcctggagaagacaattccatcatcactgccgtttctaatttctactgtgccagttcttctgcgtgtctcatccaagttctttctatgtcgtcttctgcttttttcccctcatattcaggcacattggggtgattagcctctgttctccccgtggcaatgcactgactggacacttgactccacgttcatcgtcatacccaacccttcaaagcttacattaaaaccaaagccaatttagaacacactgtgtgtgattccataaccctggctcggagcactgcctgaggactccaaacacacctgaagatagccctaacctgtgacatcagatggtgataaaaggatggccagattgggagaactcaagagccctctaactctaaccagccttagtctcagggttttcaccccattcctatagcctaagagtgagctggaggaggacatagccaggatatccagctgggcatcagtgtaagcaggtgacccttcctctaagctgaaagcagaagttcctccagccatgcctgagtctgtgtagaacctggagacagacattcagagagatgcacctgactgtatttacaagcctgaacagagaggccagaatggggttttggtcacatatgatcccagacagtttcaaagctctggtctacaaagctgaagaatagccagagagtgtttcttctgagtggctgccaaggtcaaggagcagttcatgaagcccatgtgtctgtaaggggaagcccagtctttcaggacagtgccagccactctgaagaaaaggtgaagcaaggcagctttcaggatctcccctcttggtataacacacacacacacacacacacacacacacacacacacacacacactcacaacttctgctcatcacagagattatatactatactcacagagtctatcattcctcagttacactcactgctttgctgatgccttagattatgtgttctctaaacccaaaggtccatctctctctgggagccttatccattgcctgcaaagttcccacctggtactggggatacagtgggaagggaaggtttggctggcaaatcccaaaggagaaatgactctgaataatagttaggaggaaaggaggaggcaatctattgcctaccaaatagggcaccaagtctccaagtccataccgagaacataatcctaaactaaggggaaagacccagctttgggagtggactgtaaatcttatgtgcttagagctgctgaggaaaacagttaacttctcacaaggcagcaactcatgctgccggtaaagcgtaactgaggttccatggtgctgacctttcagctacaccgcttgttatacagttctcagggacacctgggtcactttgttccttttgaagacttcccttcaacttctccatgctgccccatagaaatctcatctcaggaaaaaacgcatacctgctgcccataagtctttgtagtactctttgtctgtatcaacaaaacacgttctggattttatttctttgacatctctaattttgccttatcatccataaatcaacccagcttagtggtgtgaataatgtctcagaagtaggtttcaattttaaaataaggagagtcaaataaagctgtgactttacagagaacagaatgatgaggttaagccactcaaaatgattgactacagcacatatttttttccttctatcaaaccagatatatatcatccgtgtttatgtaaacccttaagaagataagtgcattccatttccaattaaaacaaaagtgcaccgattgaattctccaaagatctatgactcaaacattactcatgcttctaattaggtgcctccctgtgaccctacagatatgctgaggatgctcatacattatttcattcataaagtgttgctgggatacagagaataaatgccaaaaaccatcttccctttgatccagaagtaaatcccacatcctactgtggtcttacagctttcctataggtggctatcctaactggtttgtgctttacaggccaaaggatactagtggtattaagcagtggaagagctgtcggagagttagcagagcccttagatgctatactttcatcttagttgctataacaaccttatgccttactgttcctgtctattgtgggcacacactacagaagtgacttctgcctggcatcttctcatgctcccacctattgtcagcccctttttactatcttaccctaaggagtcagtctacttcatttcttctgtgatcatctccctagaaagctaaaatcaggagaaatgttttgcagcattaggccaatagtacaagacctgccctacagagatgttcagtttgtaactccccgctgattaacaaaaggctaacacaagcatatattaatacaatgcccccttcattctttttcagatacttcacccctgtggaatcgccatatactcacctgtcttttcctctcatgcatctaacccatcacaaagaagtgaacttggctacctacctgtcacgtgtaccttctccagctgtcttggtcagggtttctattgctatgacaaaacaccatgaccaaaaaacaagttggggaggaaagggtttatttggcatgcacttcagcattgctgttcatcactgaaggaagtcaggacaggaactcaaacacagcagaatccaggaagcaggggctgatgcagaggccatggaggagtgctgcttactggcttgcttcccatggcttgctcagcttgctttgttatagaacccaggaccagcaacccagaggtggcaccacccaccattggctgggccctcccccactggatcactaaaaagaaaataccttacagctggatctcacagaggcatttcctcaactgaagctctgatgacttcctctgatgcctctagcatatgtcaagtcgacacacaatccagccagtagatcagcctacctactcttatcctctgtgattaaataggcaacccgggtaagaattaaacccgagaatcaaactaaaaagagactaatgcagagtaaaatactccttttgttactgtgcccagctctcagaagccattcaaggtctaactctaccccactggcttgcagaggagacgttttagactgtccccagcatagtctcagaacagtatcttgatactgtaggggatctcaaaagcactgaaacttgtaattgaatgcatacaacatgacctgtcctccaaatgtaggctgaggaagctggaaggagaaccttccctccttgggcacctttctcctattctgtcagccttccccagaaaaccatctggagaccattctacattatttccctaagcatatgaagcacaaggaaactgtccatgctttaaaattagaaggactgtggctgtcagatccaccagatttttttctagaaatatagaaggaaactttctgctttatccaaaccacccaacaaagtggttaattccaggtgttgagtctccagttcaactccctttttatcctctttagaatctgggctctgtatgtatttgtgccttaacagctcctcctttcctgtgtattcaggacccattcttgctctccctatcaatttctccttcctagtaatttcttcctttggaatattccttttccctataaccacacctctcagactcacatcctcatccccctctccacatcctgcagttgccatcccttaattcttttgtcacccaaccattatgttcaatttcttgtgatgtctccttctgttctcttgtgtcgtagaacccgtctacctcaaatactcttgacaaactcagtttttggtcttctcagactctgatcacttccttttcctatctctgtccttacccaaaagctctctgagctccccaaatctccaaattcctccccaactataccctcttcttggaaccagacagagttactatggacactctattctcagagcctttatctttcatatcaattcactctccagactttactgacctccttatggttcttctgctcaaatatctagcaagtaccacctgcaattctggatgtccttccaccctgttcatccagtggcatcttccaaggctcttccagaataaccttacctactccccatgtttacctcctgatacttttgcctttacctggctttacaaaacatataatcctggctttacaaaacatataatcagtttcatttttttgtctagacctgctaatccccatggcattgaattactacagagatagcctgacaaccaaccttcttaacattcagttaccagggactcaagttctgaaaagaccagacactgtgagacacaagccaatgaactagaaggtagatcctcatcaaatcagtaatctatggctacaggtcatgatactaaaaaatacatcgattttgaccaatactatgagtaaaccagacttccattattcctctggaaggatctttaggtgagcagagaaaggtgttcctttacatgcatcacttcaattattcaaatgtatataaaaccacagaagttcaatcccagaggctaagtgtgctctcacaaaagaaggttctgctgggcaaatcccaacagaatctatcaggtagctggtcattaaggcgggtacttcaaagagacccaccgccacccctgaaatctgtccctaaagatatcttgaattgaagatacggacacaggccagcattcagatgaagcaataaactcatttccacaggctcagattgtcttttctgaaggtaaaagctgaacacccatgtagggtaacctgtagccacgcctgcttaggggctggctacaggtctccaagcacattgtttaactaaactttagtgtttctatattgtatcaagaagccaattgatgtaatacagaataaaagaagaatatgggactgtctttgtcttttcttggatctgtctttcaaggtgtacaccctctcataattgttatgttctcatggttgcatttctcagcatgtgtacatacacaagcaaacatttctctgctaactgtttatgtttgagtcccacacagccaatgaagacctgcctgacagcaatccctggacaccccagaaagaaaatgggccatacctcctcgattgcactggatccaacttgctccatttcaactgacactcccaccagagcttaggatactgatttcaatcaagttgaggatttcaagcaagatcttcaatcaagcaaatcccatctaacatggactggatacaattcattcaagacttccactatactaacattttcttcctacaggaccccacaaggctctccttgtcccattacagcaggaagtaacttggaggatgctacgtcccctttccccattgttgtcttttaggatagtgtatattcctagttagggatagcttcctattgattatggttgggattggaaggaggtgttcagacttggacacctctttcagatgactttaggatttagttaaaatagataggatgtgacataagcagattgttgtatcttcttatatttcacctttatgattgttaattttggatactttacactgttaagttttaatcctcttttagactaaagggggaattgtaggggaacctgtagctatgcctgcttggcttgatgtagagtgagagggtcagggcttcgtttcagtttcgtttttcccctttcagctttcgtacagactgctgccacgctggctggctaagtcgctctgtaagtaaggcttttcccaattaaatacccttatatttctacttggctctgtattggtaatttcccactatacacccaggtcctttcttaacatccacctatgactccaagagataatggtagtaatagtaatgttagtaataacatggataaaattattccaaatgtgttagcaggttttcacatcacaactgtcataggttatgagaagaatgttgtcatggtccttcccaaaggaagcatctcgatgaaagacttcagataatgaacaacaagtagctcttaaagtggcagagttaagttgggccatggcatgtgtctggacctgtatccattccgggagcctctgcagaaggagtctgttgaatcactgtagccttctgatattttgctctggaataggatagaagaacagtgaagatctggaaaaggctctgggttggaatcaaaggctgtagcgtttagaagtcagaaggagtagcctgagcaaatgagctggggtggtcaccactgcagctgctaaccctctctccaatcaccctaacttaaaacatgggaagcatggaaacattcactactccttacaagcttgcccccagttccaggcaagacatttggactcctttaacttggtgtcattttatctcactatagtgtcagtgaacctctcttgaatcaacaaaatagtttctacatgaagaatgtgaggagagaaagagagagagagagggagagagagagagggagagagagagagagagagagagagagagagagagagagagagagagagagagcagaacaaatgcaaccgatgaaccaggaaaataaaaggaatagaaaaatatccccctggaaacacatagaatgcaaaatggaaaaaggattttaagataactgaatctttttcaaccttatgtatcagcttaatttttgctatgtgttcttattacttctagaaattttaggaaaagaagttgctttgaagattaaattgaaaatgctaagtggatatttgttctttatttgctatatctctgtggtctataatacttgtcactccctccatctataattatacagattagtaaacctaggcccaaagaaattaaataacttatctgatactataaaaatatagttactgttggagtgcaatggggaaactacagactcagcaagaatggagtttgaactccagctctgcaacacactatgaaatggtcggttcctttgtgtacctaaacagctttctctgagactcggattacaaattcacttcatcttacaaatccacacaactaataatgtctactccttaagatcattataaagagaagaagagacactgaaattcttagcagcccagtgcccggcagccacggtatctgcaatgagcaggtttccacagcagtgtgtgcggccctctgtcccttcctctcatcactcctcagttgactccaagccagctactgataaagcatcctcactaaagttactaatggctgcctaattgtcaagttcaatagtctcacttcaccttcctgcagcgtctcacacttgtgaccacagcttcattcttaaaaatatccctccggcttcagtgacacaagctcttcttgctggagtctcagttctcagccctttcttttccctctccttcaccagcccctcctcttttttcttaactgctgcttttccaaagagcagtgttgtccgactgcaagtcagaatgttagtagcatttttataacgttaaatgaaaaaagaaatgatagcacaagataggccatgccaggatggataaaagaaaatagcagaagccatcaagtactgtttaataaatgtttggtctcaggcacacacacacatgtacacgcatgtcagctttttatcactgtaatagaatacccgagacagttaacttaaataaagaaaaaaggtttatattggctcatacttttggaggatccagtccaaggtcaggtggatcgattgctctggttgggtgctggatttgctggtgaggaacacttgtttaagcaaagctgcttacataagtcaagggacaaaatgggaaaatgggagaagctggcattggagtcttcagtctccatcaagcatataccccagtgacctgaagactcttatactaggtgccacctcctaaatgttctgtcttccaatcccaggacaccaaactttcagttcacgtttctctgggcatgtccaatatctgagcatcattcatgtcttggagcataataaaaataaattgacatccaagtggcatgtgtattcagggcataatacaaatgatcaccaaaaattgttacattaaagtgtcttggttctttctcctttttttttattttctccctgcatgacctcaaatggcacaacaagacacactattgactaagaactagaaacctccatattgatctgaaggctagacaactcacatggaagtcagcctggtgaacacacaagctgcctttggatagctgtccacagtgactcatgggcatctcgattgcaaagtgtctaaaccccataaatctgttctgtgcaatccagttagttaatggtagcagcattctattcattaattgccacctatttatttattcttctataaatccatgaatagctctatctactaagaagtgtgctgaattttgaagatagaaggataatggtgatattacacatagttttaaaattaaaactattttcatacaatatattttgattgtttcccctcccccaactccttccagattctccctacattgctacctacccaactttctgttttctctttccctctctctcttccaaaggggggaccacaaaaactaaaatcaaagcaaacaaaaaatcttttataaagacatgaaaacagaaaaataaacagaatcataaaaaatgtcctactctacagatacatctatgttctacaaaatcaaaatggttcaagtcatcatcaactctgaggattctggaagttttctagagctccagatgtaagtcaatgtttaaaaataagaacagcttttaaccagtgcacaaagagttatgaaagtgcaggcacgctcatgtgtgttgggtggaagctaatgaggaagggcactgtgaaatgacaggaccaacaaatgacatacaagaaccatctgtatagaaaactacaacaaatgagatataggcaaagtccagaaacaggaagtgacagtggttggctgcaaggataaggtcatgaggttcctcttgtgtcatgtttcaagattctaatccctcaccagatgaagggttttcggtactgggaaactgtgatatcgtctacatttcagatacatgcctgttgtgcagagatcatatccagagggcaaaatcaggatgcttgtgtaggtaggttacaatggagagttaaacctctgtagtaggactgcttcaggcaaattatgatttttcttgcaggtaaactcaatgcatcttatttcactatcatctagagaactgacttttgtttatcatttcaacccctactttgtgatctgtaatgctaaagtactcaagactcaataaagaagaaagaggaaaaatgaaatgtttcagtttccatactagcatgccttggtatatggtgatatttcctttctaaaatgcccttctcatctcctctaccctacatctgtctgaaaaaaaaaaaaaaactctcatcgtccttgactcagctgagtcacctcactttctgcaatatcttctctgacacccacaacaacccagagcagattggatcgcacccatcttcacaccatcactgcaccctgtgcatatggctattggaaccctgagcgcagtatattgcaattaatttgtacatgtctttctcccaccagatgatgagcaacttgagttctttctacccttgacggtctgagcagtgcctagcacatggtgttgctcaatatgtgtttactgaggggtggaggggagtaggaacagacaaactgttggagcagtcctctgcccttcctagacaattcctcactgattcattttttataatagaagtattagaggggaattcttaaaataagacctgagaattctgtacacatttaaaagaaaactacattaaaagtgaatctttgtgtccctaccccaaatcatatgctgatggcccaatatatgtgtgcatccttataaaaagaagcaaaacagggatgatcttcttcttctttgccctgaaagatacagtaagaaggtggctatcctccaaaaggcagaagaccagtcccatgccagaactgtaatctcaggtttccagcttccaaacccacgagaagtaagtgtctgatgtttcggcccccagactctgctgctctgctacagcagtctgaaccaagacacgtcttccatcccaaaatattatatcccacaaaaagcttctcctgactccaggatttctttccatagttcagcatttttcaagacgcccaactaccagggctgagaactgtatctcatttctccccctttcttgcttctcaaaccaccactcaacattctgttgcaaggccaagcacagggcagtttgagctcatccccacattccagtaaccgtcatttgactgaacttcttggaataagctttcaaatgtaaaaactttagtctttcagcttgcaaacacacaatcattgtacaaatagtaagcacggtatgtaaataatcctcttgtgcattcagttctactcccactaacaattagtataataaagagtaattttcaactttaatatgaagctgaataatagaaacactaaccaaggacctactgtgtgccaggtactattctaaacagcaaaatactaacacatcatacaattcttaagcatatgtaaaattgctgtctctatttccacattaaaaaatgaaatgctaagagggttatgtaccttgctttgggtcacagaaccactaagtagatattcatgtacttaaatatacatttacacatacataaaatcttgcaaatacatgcacactgttttaacctttttgttctactttgtacaaaaagataataatatgtgtatttctttacatttaactaaacaatacattttagatatttttctataatggttcacataaatttacttcattctttttaactgcaatgtgttattacaaagtatgacatagccttatttattttaccaattcatctctactgatggatttggggttgctttccatttctcactactggaaaatatgacgggatgcacacctttgtacatgaatcatggcactcatgtgtgaataaatctatatacaatttgtggaaacagcacctctggtatttccatttttaattttgatgcatcctgccaaaatatctcttagaaagctttgcagacttacattttcactcataatatatgaaggtgcctatttccctcaacacttaccaacactgtgtgttatccatcattttaatttttagcagtctgatgtgtctttttgttgctccttaacagcctatggtccctttggtactctaacttatatttttcaaaattcaaaagcagttgatcatcttttcagatgataattagacaattgcatttttcctgacaatttctattcataacttttgcccaattttctattggcccaactgcctctttatgtttgcagtctgaatatcttatgtattgtcaactttaacacttatgtatatgtgtttactctttttcccactctgcaacttacttttgcattttggcaatggtgtttagaatacttatcatgtcagaaacacaaatcaatcctgtcagtcattttctttggagattttgtaatattatgtcttaagaagaacttctcaacttgcaagagtaaatggatttttttcaaagtttaaaaatctaacgtggtggcacctgcctttaattccagcactcatgaggcagaggcagacggatctcttagttcaaaggccagactggtctgcaaagtgagttccaggacatcaagggccacacagagaaaccctgtctcaaaaaaataatgtattttgtttataaaaatttccaacatatccacctgttctgtgactagtataaaggaagtaggtctgctcccaccccaacggacagatagccactcattctactgcactctatagcccaatcttcagttactaatagtgaatatataaggaagacaacacttagcttcaagcactaaattcacacattgtattaaaacgattcggtggcttctgtgttttaatgattataattttaagtggtttgggataggtcaaaaacctgattcctctttaatttcttgtgtccaccatgattgttcttgacttgctttggtgagggaaagttcaaatctccctgtcaagttccagaaaaatatcttagtgagatttagcatagtgtcccactgagtttacaaattaagatttaacacatctttactaccctgaacagtactagaaggtaaatactaattcagtcatgtgacatcctgctgaaaaatcattccaattgatgttggactaaagttgaaaccctttgagggctaggttatagctcagtggcagagcaattacttaacattcttgaggctttgggttcattccctagcatggcataaaaataaagggctcttcagtacctggctctcaaatctccttctcctagctttggtttaaagcctactctcccaattaattttcccatattcttatttgcaacatttttcgaacaaactagtatacatattctactctaaataacacctcagtctctgggataaatatagaacacaattagagaaaacagatacatcccttttccatataccctagtctgaagcaccaacattttgtgtctacagtctatacaagatatactgcaaactcttgccaaggtaggaatgaataggatttctttactaatttgaggtagagggtgcaggtcaatgtatgatttggtaacttatctgaatacattgttttgttttgtttttcctgctattcctgggagagaatccttacatgggatttgaaacatgaagagacctttctgggtccaaactcggcatgcatctatgctgtgtacatctctgacaggagagagtcatggtagaaagggatgaagaatgctaaagtaactgagttcttaataatatcaccagaggagaagacaaatgaaagggacttcaagtcacataaatgtttaaagcccagaggagctgaggcaaggattctgagatgctgggaatgaatgcactgcattacagcagagccgccacaccgagggggcagaggatcaggaataacgaggggtcaaggtggccacatgagggtagcagagagcaggctatgtggcgaggagagcgtgcaagcggcctgggtaaaagtgaagacattgaaattgcgaatcagcatccatgcagtactttatattaagacaatgagtacaaggcaagagtctgtgcaagacaaacacaaagaaacagccctcaggaagctgctccaaggtgaaggagtctgagaaggaaataacaagtatatgctcagtctatgctaggagtgttacatgaatgtgcccacttagtaatcttcacagggaagctgtaaggttggcagtaatagagcctaatttttagcaaatgaaaatgaccgatgacgagcacaacagcacaatgtgtatttttgtattggctgagtctaagctcaaccccatgtttatccctgtaccatcttctcatcagccctatgcttctcctcaagggctggaatcagcaccccgtaagctgtcttggggtagaacatgcattcacttctccatctgcacaatacacagaaaaccacccatggcttcacatgaatttatcaagaacactctgaacacttccccctctgtttctgatttacccgtgggagctataaggaaaccctgaaatgaggaagtctggtgggaaacctcaactgatctcagctggcaaaggaatactactagtctattggtagcaagcacttgaactttagggtttaaaaatacttgggaccaaaatggaccacatgctggccatgtgtgtgggtggggggagggggtcatttaaaaataagtaaaagcaaaaagaatgctccggaaggcctggaacagcatctaatgttcaactcattgccttcagctgtggtcttactaacctactgtggtctatcatgaacccaaccatcaaagagaaagggattgacaagaggtgctgaaatgataaaggaactggcagaaggctgtggattggggcactccttctgatctacaagaagctgtggggcaatttaataacagtttaagccctctagagcgacattacatagtggtcagagaaaaacgaatgagatgtcctctctcaggaatcagagggaagagcctcaagcaggaggcagaggtttgctttggacctacctaagacaaaggttcttgaggataaaatctttgcatctatttaaccagggtctaccagcacgctctggctatcagtgttacacacagcatcttctaatttttggcaatacagctctaataaaaattgacaaggttcccttccctttggagcttacacttcctccgagaaagaagctagataataaacaaatagaagacaaaatcatcaaaataataagtgattgcaaggaaataaggtatctccaatgagtctgtatctaagctgagaagcaaatgcaagaataataactcagcagagagagtagggaagcagtccagttcagaagggtttggggtggatgtgagcttggtgtctacctgtcaggaacaaaaaacctggagggtacagccaagagactgtatgaagccagagaggaaggcaggggccatactgtgtggtcttgtactactagatttgcaaccagtggagaggaagcacggagaaactcaatgtcaaaaggcagtggtgtttcttagtgtgaaccattcctgtgaactgttctaatgaggtatttacatggtttccttgggaatcaatgaactttgtcaggagatgcagcctgtaccaagtagtttcttagggttgtcaaggcacttggcattaggaacaggaattttcattattaactcatgaagccagagtatcctggggatctaaattatttgagtaagtacctccatgacagtcttctttgatcaggcaaagaaagacacactggaatgaccagaagctttcaagatacttaagatttctagggctaaggagaaggcttagctgctaaagtgcttaccacaatagcatatggactgcaggttaggtcgctaacacctggatgtatgccaggcccatgtggtggcccttacggtcccagtgtggcagaggaagagatgggattcctaggccaagccagctagctagactagccaaatggatgagctccatgttctagtaacaaaccctgtttcattctataattggagagtagttggaaaagaaactcagcatcaacttctggcatccacatgcatgtgcaaccacacacaagtgaattcgaatatgtatacacacatacacacagagatatcacccccactacttaacatacaatttataggaaactaccaaatcgctcaagtcacaattcattgtctacaaaaaggggataatactgcttacatgccataaggctgtgcataaagaattcacaatgcagaatatgcaaaatgccaggcacacagtaggcatcccacgaaggctgaataaataaatgtatgtatgaatatattgaagttacatgtgaatgaaagtatatacattaacttttcacagggcttgttgtttgagcctccaacattctttaccatcagaaagagctcaaggtctcagggaatgaagatggaatccaggacttagcgaccaaactccctcttctctctcctgcttgggttttttaattcaccttccattcagttggtctagttatcaccccaaaccatgttcattgctactatccctaaacagaaaatagctcactcagtcttcttcttgcctctccagtctgcccttgacttgactcatcatctgggctactggtgctgctgagtgccagcttcttcttccaggaactgaagtagtgaccagacatccaaaattcaacagcaaaggctctgtctatggtaactgcaacagtcagtcttactactaatcctactccacaaaatgtaggttactgtgaaccaatgtccatgttcggaagccttgtctacaccatatattgggtccaagtcctagagtgatgctctggctattttctctattttacccataaagtctaagactaagaccacactcagcgggtcttatttagtgtcatggcactggttctgtggtaccagaggggacaagcttttgcagctcttatccatctatctagcactgccagtgttatctctctaaaatggaaatctagctctgacatttctctgcttaagcccttcaatgactgcttgtctgcagaataaagaacaatctagcataaatttccccacagtgtagccacaactgtggtgttccttgcttcaccatttccacacacgctagtccctccttcatgtctttcattcctttgacacctggccaattccttggctcaatgtttctaattgtaattttcatctctcctctgttccttctgtccttcatacatacactctaccacaccatggtgaatgtgtgtctgcaagccttttctcctttttttcactatgaattcttctaatgcggttttcatgacttactcatctttatattttgcttacaaaacactgacattttgcaacagcatttaaaaattcaccctcacataagagtttttaaaagcaacccctttctgttagaatcgtctcagctatcaagtccctgaatagtaacctatccttgactcttgcattatttctcatgggtaaatatggttccaaatgggagtggggcttggaaatgggataagaaaattgatctactaagcatttcactttgtaatttaaaaaatttagctaggcatggtggcagatgcctgtaatcctggcacttgagaagtagaggcaggagaatcaggagttcaagatcattttcagatagagaaaaagttagaggctaacctgggccactcgttgagatgcagcttcaaaaataaataaataaagtgattgtttatataatttcttaagaggctacaacaaaatacccaacccccttccaccagtattgttcaccacatagaaactcctcaaacaggctatgaacaaaagaaggaatgactagggagtgaagttcagacttggactgaacttggtgggttcttacacagcctggcatgtttgttcacccggtgtgcttataaagactcttgttgcatttagttagtctatatttacaaatgtaaaagaatgcaactgttcagaaattttctagaactcttctgtgggaactcccttaggaagcaatacataaatcagccagtaagtcactgactattattttacagccaggttttagtttttgtattgcacagcatgaatcaccaatttatatctttaaagatatttgtccaaattgcaaatgatgtttaaaggatgagtgttttcacaactacaggaatacaaaacaaagttacatgcagctagaaatgtaatccaagtgttgcaatgccaggttagcaaaagcaggactctcggttagaacaacagacgacagacagacaggtgatagataaataggcaagtagcatgctctaaagttaattataaagattataaaatgttttcctacatagataaaattatgagtgcatgtatattacaataagcctgatcaacttataaatggaatatccatataaccaaatgcaagcatacctgtgtggaatatgccaatgaattgtgattgtatacatgtatacgcttatgtggaaaacggtttattgagcctgtgtttataaatttgtcatttggctttattcctaattaggcaaaattactattcttttagtttccacactgggaataatagatgcatgaaacaccattcctgccctcaaagagtgcacggttagagaagaaaaattattacaaaaccactgcaacagagtgagatagttataagacttgaagtatatatttaatacaatggtagcacccagaaagacaagattagcctcaggtggaaggctttacacaggtggtagcacccaatcaaagtttggatggataaacacaattttcatcagacttgatgagatgggcaatccaggtatagagacgagtctgtgcaaagacactgaggcatgaaacaaccaagtgtgttgggaaaattacaagcagcttgatattgctggaacacagactcaaggtgagcaacgtggaaatatttcactggagaggctaccgatccccttgtaactgaaaatgtgcatttttgtttgcaggtgattatatacgtctactgtctttccataatacatcaatcagcctgaagctggagcaatggtgacacacaaatttattatatgattttgtttttgcttgaatttatcacagagcaatttcccccgtctctgctcatatttgttctatttcccttctgcactctcaccttttactcatttccctctgtaatgtagtaacccaagtctcttcccccgtgcatggtctcctcctatatcaatctgcgtctatcgacagcctcataggtcatcctcttgtctactgtcagacaactccgcttctctgacattaagaactaagcccacatgaccttcagagccaagccctgagcagcttctcgggctaagcacaaagttaagaatgtagactttgaggcctggatatgtctgtcgttccccatcactgtgtaactgggctttttcgggcatctgtaatagaggtgatgaatacttcacagaggacatgtggatattaaaatgtgcaataagtgtaaagaatttagctgagagtctagcccttaatagttattgctaattataaattcaaagtgtctagtgattgtcatgcctaagtcatacacatgcacggggcgatttaatttggtagctatttaccttgactttatctgcttgcctggaaagctgtgggaggcagagctgccatgttacacaactccaattagaacgatgccccctggggttgtgcaatatggctactcagagaaggcgaaggcgaggaggcttttctctgcagttaggttctttctatagtgtgaatattttaacttcatcaataaattactttaatgtttccaagtgccaatagggtctgtgggcagggacatgcaaggattttgtaattttcttgatctctatttcatactgttacttacttaaaaataaaacaaaaccagtaatgatatatagaagtcaagccagtgggtattagttaagatttgaggagatgggtcaacattacttgttggcaaagaggaggtgagcacagagtcaaggatcaagcaggcttggctgtagatccactgattacaaatataatcatgttacaccctgttttgcatgggtaagggaactaataaatccaaccactttaggtagcttctggtacccacgtgagatactgtgtgtataaagcactcagcaggaaggctgtaaatgatggcttctcaactcatgggacctatggccagtttttttttaattgtgtgcacgttgctttcctggttgccagctcaaacctggttagagtgaagatactagttaaaactgataactaagttggggctgctattaggactggtagttggaatccttaatagattagggttaggattaaaattagaattcaattaaggttagaattaaaattcgtactgaggttattattaaggatggtgttaattaaaactggataatagaagtaagggctggtattgccaagtactggtttagttgggtggaaaattgaagaggaaagcagtgggttgcagtgccaagagggatctgagtgactgccgggtcacatcttctcagatgtgtttttccctataggtgctgctggtccctcccaagtgaacacatgaattcaccctccacaagctgagttccttctttctcccctgggagcagaagctgcgtgggggaaggaatgcccagggcccacacaactgtgtctagcccggcatgagtgccagtatcacattccacacccccagatacccaggctgttgctgagtggacaggggcattcaggcagccacactcaccctctccccactccccttgttggctctccccaaatttcactgaagctgccagttctgtcatcccacagacaacccacctcagacctcaggcaagtctctgggaaatgcaaattgtatgtcatagcattttcaagtggagagtaaccatagagatcacaatccaacagagatacttatgttctacctatttttatgataggataacccttgcaggtcagtcctttccttgtaaagcccctttcctaagcaaatgacatgcacagaaaatgcaaggggctgatggagacagagtgacagaagaattgtagagaatgggtttttctaaatggaatgcatcctatataggagaaactaccattctgagttaaataggagaagggaactcttaaaaattgcacattgctgtcagatactaggtctggttctcctcattcttcctgccttcaaagggtacttgctatctgtccctcatccagtcctgagagccttcactagcttgctgttgagcacagaaagccacttggcttctgagcttcattttcctcatctgttcaacaaagactccatttaaaggtatgatcttgaaggtcctttgcagctctactacatttttattccataattctaaaagccaacggcaacttcatattaccaagacttaaaaggctgccaaactcacgatgatgatacaatgaagggaacaggagccggtaggaaaagagcatcccagagtctcatttgctagccttaatactgtctctccaaaacagcttccccctccctcctaccctggtacccaccccttacggtagagggcagggccagagcagcagtcatcagagaattaaggacaggcagaaggggatcgctgtgatgcagcagatggaaaagatggttaattaaaggactttgggacttaatcccatatcccgcctacccccacctcactcaccttcaacccccattacccagtcctctctaaatcccacttacttgacagctaagactatcgtttctttatacatcaagagcctctagctagaaaagcctgatccttcccaacaaggctgatcatttgttttgttgtttggtttggttttaccacaccccttccttttcttatcataaccaatctcctatcagcctggtctcaccgccatcaagaagtgtcatcttcctacaatctcccctgtccagtctcctccttctcttacgtccatgcctccatgtccctacaatatatgttactccatcttcactgctcagatttcaagatagtagagatctcagggaggcaaaacgatttggcatcgccaacgcaggtcaaatcagacgttgttcaatattgtctagggaaaaaaaataataaccacccagacagtcaagaaatgtccaagaagcaaggagatttcttctctggaaactataaactccagaaatagtgtgagaaaaatatcagagcagacccaggccagcctgcaggggttccctgaacagtatactctcagcccaaacttcactgcctgtcatttagacaaggcttcacctgttacagagtatgttctgcaggctattctcaggttcttagatgacagggacattaactacatcaccatcaagagcaaagaaaccgtgacatagggaaggaaagattacccaaacattaaaggctagcacaagaaagcagcacagaaaatggactggaggtgttattagagacatccacatcccacttgtagaatgaagcatcatacactcttccatgagatgaccagtgctgtgtcctctatttctaacttcctttgggttagatcaagttttttttttttttttaagaactcttaacatacctaaaattgcccgatttttaggattctaaaatttagaaatttatatcccagagctaaattccaacaaaactaacccagaaagacccttttctgagacattccaaaaactcttccagagataacctccaagcacagcaaatgctggggacttgggactcttgagtgtgagcaagtgcaagcactgtctttctcatctatcttctatatagtcttggagacaagagttatattcctcacactgtttcttgttctgtaggagggcttgtgggtctgcctctcaccgtgggttgttactagctgaaagttgagagggtaagagtctcttaaaagactgggaagaaggggtactgaagggctagctgggctaaaggggcacaggagagagagagcaacaaggaaggaagcaagtgcaaagttactttgcaggacacttccttggtttagtatctggggcgaagtctttgaagaaggcttgaaagaaactgagtccagtggcctcctggggtctgctttgcaaaggagattgcctagagacacaaattgttgctggacagatagataagtagagggtctcaaggaagagggattacggaagctaacgcttaggagaaaggccctgagtaagtaggtaccctggggaggtatccttggtcacactgctgataggggtgccctagctttggggatcccggttgcctaaggagaaggcggggccagaggatctcaggctagtgggcacgcccttgcccaggcctgcagtggacgctctcgccagctggcccaccgccctgcccacctcccctctctccaccccaagccaaagaggggtgcgtgtggggtcccactgctgtgccagctccctccctttgctccacacccgagtggtactggaggagctcccgggggagaagatggaaggcaccacaaaagcgcggagggggtgtgggaggcggggggagtagggaatgcggcatccaggcccccccgccaccagcccagccccccgtcacccccctccacctccaaccgaatggtttgctccgagcgccctatttaatcccggcgactgcagcagcgccggctccctcccggtacccgcctcggccccgggcttggaagccgctccgggggcgcccttttggacagcgacgccgtctacccagtgcccccggccccagtccccggagatccaggctcgccagcgcctagccggggaggcggccaggaagcgcgatgggggccccttccgccttgccgctgctcctgctcctcgcctgctcctgggcgcccggcggggccaatctttcccaggacggtgagtgagggagggggcggcgccaggggaggtgaccagtgccccgaggtgggggttcagattgggagtcgggcgcagggagcctgttggctttgtttggaagcgggggttcaagtcgccagcctcttggaatacccttgtgtctgtctctgagcattgctgtctctgaggaccgtggggtgtgccggcgtgtgtaccctcctatgtgcacggacaactgtgtgtgtctgcgtgtgcagcaggggtctggatctcggggggttgctgtctattttgagcagccggggtctggatgtgttgatgtccgtgtgtgtctgggtgtgcgcgtctatgttggtgtctggtgctgcgtttctgtgtcagagtctgtgtgtatgtctgtgtcagtgtgtgttgggggcggagtgagatttgtcgctgtttcagtcagggcgtgtgttgggtgtttgtgtatgtatgtctgtaggggttgggtggccagaacgatcccccaaactgctgtatgcaaacatttctgctcccccgcgcgtcccccacccgccgcggagctctgagtgggcagggaagggggcctgggtgaggctgtcgaggggggcgtgggcaaaggagagggggcttctccttgaagcaaaacaacaacacagggcggagggggctccagtttggatctagtcctagtggtggcaaaatctgggaaaggaaacctatacttgggtgcggggcagcaaaaggagagagcaagatatttggggagaaggatcggtgggaagcccaaagctttcctgggctgaacatcaatttctccaaatttagggtggggtagcagactagcctgttagctccagtctgcaactcaacccttcttgggtttgtaaaggtaaagaggtgaaggaaagggagttgggggtgaagaaaggaggcggggccaagggagaggggacttggggaagagcccctcccgccccaggccaggctatgtaggtcagcgctgtgggggcatctcagccttcttaaaggctgctggtggttaacggggtgggttgaagaactgtgtagagataagaagaagggcgccccagctcagagcctcaggtccccggaggagggaagactggcagtggagggactaaaggaatgcatcctcctcctctcttcctgggcctgtcagaggtgggctgggtgggggaggggaagggaatgggaacaggacctctgcctgagcaaggggaagtggggagagtagagggagggtggtggctatgcccggccagatgccaacgaaaaaacagaaagaaccgcaggggaggagaaaggggaggtggttcctgggcgaaggacccagtggccagcagggatgggcacagggcggggcggggtggagaggggaggggttggaactggggaggatgatgtagagaatttcgtctgaggaaagcgggctgggagccagggtgctggaggaataatagctccaccttgcctgacctcctccccttaccctggcaaaggagcttcccctggtgtggggaccctggggatcccctctctacagttggttggctgactccttcctctctgtactccccaaactccccaaagggagtttctactgtcactacagagatggaagactcttctcttgtacatggaatccccttccccagaggactgcactggtgaccctgctcacagaggagatgagcagtcctaggggacagtggcttaatgtaaggccaaaaaggggtgtttgtcccttaactttcagtgaaacccctgacttcctcatactcatagcagaatcaaagaaacaagtgctcaaactacaatcccttggcaatgggaatgaagagtgccaacctaagacctggaaagaaatgatcgtgtcagtaggcttctggcttttccctttagaacataaatggtagagactggagtaaacctgttcagtgacaacaactccctttacctaatacatggctctttcttgatcttcaattgggagcctagctgcttttgagcttaaagtccagagaaagaacattgctctcttctcagctcagaaatacagtaagagaggaagcctagaggaaagagggaaaagcagtaacttctgtataaggaattgaagagaatgggtcaggaaaaagggagaggtaggatacccttttcaaagacaaatgcaatcaagcctcccgaacatctgtgtagaatgtgcaatacttgccctgacgtttgaaacataaccaccaggtatcctctattaaattaattctgtaccttgatttctgggtctaagaaggtgagccccaaatgattggaaggaagtgcatagattctggaagccagtcctgaaggccattttgactaggaccatgcaggtgtgtctagcatctctgagttcccctggggctcctgagcagggtgctgggtaatacttaactcaacctataatgtttgacccgaactgggagcgatgcgatgtgaaggcttaaggacaaaacaatccagcatgatgaagtttaggtggtcaagggtgctgtgactgggaggttagttaattccactgagaacgagaaaaacaaacttcatgtgttgctgaggtgtaacgctcccttgggtacagcataaatacttaagactcttaaggatgagcagagattgagaagctgagacaaggcagggccagcaaatgctatttgaacctgaccattaacgctgtggccacaaccttaggaatctgccacctgccctcccttctggcctctccccactagtactgacagacattggcagctccagtttgagaaacacaaggcctgtgaacttaatgcaccctgtggtcatgtctctggtgagcagcttgacattcaatattgtgaccagccttcttatggctctttattcccaagttattttcagtacagtgatttaacccagggcatggacaaaccttgctttgctttagcccaggttatagcaacttaacctttaactgtcccacacatgcatttttcttccttcccaatgaccttctgtccactgccatgcattctgcagccccctggccaggtgcccagtgtggagatcatgcccaatgtgccggagaagcccagcattctctgtagtgctgcccacggatctgcttggcagatctgctccattgagtttctgttccttgttatagctgtaagagttctgtctgtttttatttctgttctcttcttagttccagcttaactcttgtgaaggacatactctcccttaatatttgcacataatctgagaagaggaagttcaggccatcagagagacaatggaatgacagagttaattcgctgaacattcagtttgtctaatgtaggatgtcaaatgactacccagcaattatgaccagacatcctatcctaagtttagcctagtcctaggtgacaaggttggctgtgatagttttctctgggcccctggtctctcgctcattaaggaaaacagaccacaggagaattgccaaaatgaagatctgtagcctttgcccaatttttggcttctctaaagctacacctggcttttgctacagtccaacattctctgctctccactgaatgtcagctgagccatcagagtgcacttagactcccttcctttcttccctcttccaactgaggaaagaagacctagtccaatttcaagagtgacatgttgaagatactcagtatccacttgaagtgggtgactcacagttctgcagccataaaaccccacagatggcatctttttggtgttctggtcattttgaaatagcagacaggacttgatgtcattgttctgtgaatccttagattggacttaggcatttcctattgctgatcactgtacttttttgtatctaatatgtagaatgctgtttaaagctgctttttcttaagtcatgtgttagggaaaaaatctcacagttgtcagagaaagaaaacccttggggctgtgcctagtcacattcttcactgtttcctactccagtggagcttcctactggctccacgatcatttttttcttgtcatctgagtctctgtaaaggaatgtcgtctaaggatggcagtctttgctcctgattcttctggaagcagtcagcttcttgctgaatgaaaaatccagagtattagaaaattggagtaattatatcttctttttctgttttttctctatatttttggagatttaacgtgtagacttatgaatgctagacaagctctccaccactaatctctgctctaacccaagatcttcttttatttttaatgttagagtccagtgcttcctgtttaaccattggctacaggccaataggacagaacagtttgcttcctgtatagggtcatgtcctagatgactacccataggctataagaatagcaatccccacaggattgttacaagatagatgatgggaaggagagagggatgggaggagagagagagagagagagagagagagagagagagagagagagagagagagagagagatcacagaagagtctggaaagccactaggaaaagatataggtctctaagaacacattcaaattaaggataaacattctatatcaagacccatctgtgctgccaggatcagcagtggtgatagttctctgtaaggtcagaaggctggtgctcaggcttttacactatgcaagcaaaatcccaatccagcactgtagtatgtgataaggaagtccatccattctaatcctgaaaaaacaaaaaacaaaaaacaacaaacaacctctcaggagtacaacacatacacctactgagatatttttctacacacagtggcccattacagctacatactcatcattgaactagcaagtattaaagactcacttatgaatttaccaaaatttccttaagtataaaagccagtgactaaatgtctccaataaaacaaagggctgtaagccctggtgataccactctttttttttggggggttgtctttttttttattttagagacagagtttctttgtgtaacggttctggctgtcctggaactcactttgtagaccaggctggtctcaaactcaaagagatctgcctgcctctgcctcctgaatgctgggattaaaggtgtgtgccaccttgcccagaagacaccactcatcttaaaagacctgatcctttgcctcttctccttgtgtcatcaaatattaactacttatagaaaattagagattgtcagaacatttgtgtatgccatatatctgatgattatacacattttggcttccttgtatcttagtgtttctggaggtagtgggttacaggaactgtatgttattccttcattagacaatagtcctaactatatttttaataacttgtagcaaattaaaacctcttcctcaccactaacacttagataatctggctaatgatcacaaactaagtctggtggtggtccttgaaatcttctgggtttacacaacagactcaaacagagtccttcagaaaagaggcatgatccttgcagaaatgtggtgctaaattccgtgggcactggagcctgctaccttaacttgtgatgccaagtcccaagtcctcttttaaataaactacctgtgctttgagctctccatggtgctggcccctcgttgtgacactccaggcacttcttgttgctctccatggtcctgccttaccttttgctttataatctctgatcttgcggtacagtcctcagaactggctgaactcccccccccacacacacacaccccgtcagaaacacttgtggctctgatattttaaaagggaggccaaaccctgttatagagatacggtgagtccttatgactaatcaactctaggaaggaaacagaaatgtaattctcaggttatagatgttcaggaaactggggtctacagtgtcctcagatggccttgaaataactgcaagttttactgtagctggaaccatagttgaaaacacaactacagatgttgtgttttaggtagagatggaattgctcctgtataataatcatatatagtccacagatgtggagtgtagaatgattcctcctcactcaatagcactaaatagcacgctgaatctgatgccagctatctgccctactatataatgtctgctttccttctgtcctctacctcagcaatgcaagcatgatgtgtaataatgtgtttaaaactcagtaatagagaactccaacatatgaggggaacaggaactaaatatcagaaccctgactcatttccaccactttcataggcatcttttatggatggaatggccttaaatattaatgtcccatactgggttcatgtccttggtcaaatctcaatagctgtatctttaagatggaccctcccacatatctatcaataatcatctgatgacatcaagtgccacccacctagccagcctgttcaccatattacatcagacaagggtaagctcctcgtcccctgagtctaaactatcccatgtcaatttctacgtgggagtttgtttatacatacgaatgacatagagaagtgtctaggaagccagatacctgaatgaatttccagggtgtttccacttcctcacttgaagcaagaagaagcttcattcatcaagggcagatgatgaaagtgatttatctctatgagggagccttctggaagataggactggggttacagcaacagctggagtgagtatcttgcatccactcatttccctgagcactctgctctagtgaagagcagacctgtttcaacaagaattgaaatgcagagattctattctcacattttttcagaatgtccttcatccctgtgtgaaatcttaagtctgggaaggtgtccagtgtgtgtgtgtgtgtgtgtgtgtgtgtgtgtgtgtgtgtgtgtgtgtgtatacatatatatatatgaagactgcatttgctaaagacttattttttttccttccccagctagacttgtactaattgtacattgattgctaattataaacacctttagctcatttacttctggtacagggtcaagaaggtcaggagtatcaccttgccctgggaaaaagaaaatgcgatgggagtctgtgtcccagccgttcatctataagttgaccactacctgtctctcttccttgtcttcaaaattgtctcaaacattagcaaagcaggatggagagctagtgctttaagtatcaggtgaaatttggaacaggcaggactttgctttgtgtgttggtttatttttcttctatgccttggccctttgctttccagtcaaagcttcacccaggttaaaaagctcctaaatatacatttgtttatggagactctggcttaaatatttgacatcctttagaaatgcagaaaaactttgagtgcatcagtgacaggtaacgtagaacttagagtcatgcccatcctttaaagaacctgaggccaagttcttccattataaaatcaaggccagttttaccatctgtccccaaacgtttgtcccttgacaaacacaaaattgccctgggacagtggacctcactatttcttacacttcctaatagtggcttttttccaaggatagcgtaggttccccctccaacttgcgtcttgtaatctcacacaaatataaaacacagcaccactaagccccctgagccgtccatgttttcatttatcctcaactgctgttaatgccaagtcttttctggtttccaagccctggagtccaatgtcagtgacagatggactgagccacagccctagggaagagaggattctggccctttcctggggagtttgagcagaagaaagagactaaattctgctttggggggaagctctgaggttaagccatatggttttctggaagtaaggggttctgattaatatgagcatgtgaagggggctctgtatctgggtcataataaaagctgtgtgtctgtgacagaaaaaaataaaaaataggcatatgaataatgaggctcatagtgtgttgaaggacacttgctgaaggagaggaaaagatgaccaagttggaaaatgcaagtatctcgggcagcaaggaggagacataaccacatcaaagcagagacactcaatggaggtttaaaaagagggaaggagggacctttctgtcaaaacaacattatttgccattttggagactgtgggatttgtagatttgaaagaatgtgtctgtctcacagaagagttaaactcccagaaaagcacgaagtaaggctagcatgcacaatgtgacacgctttaaaaaaatacagattttctttttcaagtgataagaatgaaggagagagagagagagagaaagactaagtctcatttaggctcaagggaatcagggaaactagcgtagtgtgagtgggtgtgtggagcggaacacatttttcttcatgtaacactcctaaccattgccctgaacctgtcactcacaccctgcctctgatcatccagtgaagggaaacagtaaaaacaagtcaggactatcagaaccagcagagatgaatgctttcctgcctgcctcataacaaattaagcttttccacagcattgttatccttctaccccaagccatcaccctgaaagatctaaagccccaccttaacagcaatgcatggcatggacccctgcaaggaagggagtctgcacatgcatgcagacaggtcaggtgccgaggcaccaagtgggaatggcgggatggaaggaatgtattggaaaccagacttgggatcttgcaccatcaggaaatctgttctttgcatgttcctgatttgctgagcctttccacttagtctcaattcctgtcttcccataccctttcaatatgcactcagtgacttccatgttcaactctgttctgtttcctttcccaactgctttccttcttcttttaaaaatgtattggtttgtattttatgtacatttggtgttttgcctgcattttgtctttgtgagggtgtcagaccccctggaacagaagttacagacagttgtgagctgccatgtgggtgctagcaattgaacctgggccctctggaagagccctaatgctttcctaaagtatggtggatgtgtattttccccagttctatcgtgtgtgtgtgtgtgtgtgtgtgtgtgtgtgtgtgtgtgtgtaagaaataacacattttaggaaaggcataaacctctcctgctcaggttaagggggcaaccaaaccttcagataaaaccaggctcatggctactgtaccagaatacacagcccacatcaaacctgccctggtttctgaagaattagatcacttcgagaaggcatgaggagttgaggtaacagaccctgcaaaaggctgtcatcattccaggtaccatcctatacctccacagaacctgttctccagaagttctcagggacactttccagtgttctgttccctcctgccttcacagcctactgcagcagagggctagatgtttgtttagaatccacatttctggaataagggggctaaggtgaccaaggatctgtttaggatcagatgcacctcctttttgtctaccaactgcatttgtccttgttacaactcaatattggctgcagaggggcttgttttggttgggggccagcccagggctccctctcagcgctaatgcaccaagaacactgactcagtagcaaatcaaagcaacagctgtccccacctccttctccgccacccacttcccagtctctgctcctcagaatcttaactaagtctgcaagcatccctccccagcctaccacaagcccacttctgcctccggattttttctttctcgctcaagaataggacatgcacctctgctcctctgcttttttcctcccatatagtctgacctgtgctctcttccatttcacactcaagtacatgttcccctggctgtgcaaggtagattcaacacacacacacacacacacacacacacacacacacacacacacacacacagtatgcacacagtcttattcttatggccactgtttttagctcctaagggcccagcagtggcttctgcccatcaaattcctcttttgtagcaactaaagtctgtggtaagtcctggaatttgcgaagctgtggcagatgagactcctttctctcaccccaacttcccaacctgtctaatcgttagtagactaaacgtcccttgagctttggggtccttcccatatgtgggacaataaggagagcagatatcaccagatagaaaaatcacactcagtggcaacggaagctctgaattagctattccacaaggactcctatcatgcgataattaagtacaaaagaccagagttataaccatagctcccactaacggcctgtgggacttcttcgaattctgacacttctcggaatttcagttcctcattgttaaaatgagcagctggacttggggatgtggttccgcagtttgcaaacatgcatgctcacacgtacacatacacaacagtatttgactgactgctatgtaggactgtgtcagttctgaaagtctgttctcatgaaagttgtggaggagaaactgtgttgggcaaattaattataacaaaattataacaaaaaaaggagaaaagtcattgcactctggtggcagaatcagaaaggcatttttcccattctgtctgatagtcaatgacttcaacagtaaccagctctggccattaggggtcagtagaaaatactgatggaatatggactctggctatagagcttaggaaacatagatgtgcacacacgtgcgcgttcaaacacacacacacacacacacacacacacaccactccttcatgacatcttaaatttgcacatgaaaatgtttttgaatgactgactttttatttacttttaattttaatgagaaaagaatattaacaccagataagtgtttcattttaacctcatcctcacacctaccctagacaagctagccaactatcctgaggatgcttctcctcctctaacctggaaaactttatgttttccacctgctgaggatggaaccaaaagaggtccatgaaatgcattataaaactttttggaatgcaggctgagtagctcctaaccttaggattttctaatagtgtaaaaatggcacactcctcaattctttagtccctggtccaggctttcccccaaaggaaggggttagttagcaagacaggaagttcctggggggagggagcagtggaaatctaccctccccccatctgtttccacttactctcctgtgcctcttaggagactcaaatcaagctgggagagagtaatgactttaggccccagaggctgcttgacaaacaagactcaggaaggaagaaaacagacaacaacagaaataagagagggaggcaagaaggaacaaattcagtgacaaagagatcagcaggggaacagggaggctaagaccagagggcagcagctgaggcacaattgagctcttaggttcagaagtgaataagaactaaagcacgcctgagttagggaaggggaagcatccatccttgaggacttccgggtctctctgcagtacaaaatctcatctcaatggaaaaagaaggaaacacacctgaaaagatagcggtgcctagaaatcagaataacctccacctcttaaggtccagcctccctctgactatgcccgaatgttcagatattagtgaaccagaatctaacataaaattggcaacgtgagacagggatgcagagcaagaagaaaatacagcactagtcctcaaagttctggtctagaaactgagggatgacttctgtaactctggcacaatcctggctgtcaaagaccaactgtaggaagttgagtgtaaagagagtcctttgtgaagccggagtgactcctccaaatcttggagttatcttctaagtcagcattcagatggaactggtccagtttcctccaaatgcacattcaaacatttactcttaaagaaaaatgtggctctgaggatcagaaaacctctaggggccaaattccaagtttaatttcgctatggccattctctactgtctgtgacccgcccgtgcatagcaactcactaagcaacggaactgggtgagattgtcaggtctgggagcccaacaatgagtctcctaacggtggatactccattctaaaagacagtcagtattctgggccacagcccccagtatgtttttcacttggagataacacttctccacccacctgtcagggtagtcgtgaggaataacaagtaggctgggctgaacattatttttaactctggagttagagaaatgctgactcatcaccatcatcatcaccatcatcatcatcatcaactcctactcagggagctgttttttctctggagtcagggaagtggggctccggacataagcactagcaaggccagctgcagtcatgcaagcccagagctcatccctttgtcctactctccccaatgtgcacctatgacactgttaatagttctgccaatacattcccgatccccagtgcaaacaaggcagggaagatacagaaaccaaacagtcaagggtgatgctggcatactctcatagccttccctaccagtcacttaaattgcagacataatacatttttattcatttgagtaactcacttatttattcaataaatatttattgagcccttactatgtgtgaggtcctgtgcttgcagtgaaaaactgagtcattggtgccaatgtatgctttgaagagacacattattaagtctgcagtccctgcctcttctactcccagtatgagcaatcaatcagaaggaaaacactataggggaaaggattcctttccctctaaaatgccgggaagtctaagtctatcagaacccatgggtaaataaagcaagaactaagaaacactcaaaatgattgagagccaacacagtttttagcctaggtgctacaaagtgatgaaaacataaagagattttgtcaaaagttttaaataaacatatctgctgtttggctaaccaaagagtcccacattgtaagacaattaggggtagacaaaatagatcccaaagtagggagtgaaggcacattataaaatgtggcccaggatactgactgtcttttagaatggaatatccagcattagcagttaaaagcataactcattggatgctaaccacaacaccatcaccaccacaagcaccggctctaacctgctgctctgtaattgttttcattctgcaggtaagcgttatgaatagcatttaggtaagccatccctggccaaaaatataggaaagtcttccctcacctatccccaacccaccaccacaacacacaaaacacttgcttctgcctactgaggcaggtgggaagatgcagaaatcctgagcttcatggccagagagacctatgattaaagcttgttgtgacaagctttaacccttactagatgcaccatgtaattccctaattgactggacttatgcatgtcaacctctttaaacttaagtcttgagattaaactgtttttttgggggggctgttgttattttttatatcaagtcctgtcttgtagatatctggatgttcatgttctaggtactccatacttttcttaggctacttctttcttgcttttggatttgttactttctctgcagtaacagattttgagctctgttctcacaaaagaagatactcggcatctgattcatttaataaataaatatttattaagcaccttctatgtacgatatattagggccagtattgatactaagatgaatcagacatcaactgttcttataggatctttatgatttaggaaggagcccaatttgcagtgcaaggtcgaaggcactgcatcacataaagtaggcagggaaagcaatgcaactcagagatatggggaagaattcccaactaggccaccaaggaagtgttcttgaaataagagctacacaaagtaggcttaaaggctagagttaagacctgtgaagatgggtgaacagctttagaaccaaattattatagaacagggaatggacccaggatggcaagtgttctaaatggaattctaaagagctcctgtgtctagaatgtgggattaatgaaatggaggaaagacaaagttgacaggtgggttcacatcagactgtacagagcctggaaggccagactaaccaatctgggtaccatctacagacaatgtaaagttggtggggaatatgacttgataaagtacttgctatgggcctaaattcagacttccagcactcatcgtaaaagcctgacatagtggcatgcatctggacacccagcactaatggcttggggtgtcaggtgcacacctttctagaaaaaattaggtaaagagcaagtaaatggtaaaggagcttactgccaagactgacaaccggagttcaatccaatgacccctgtggtggaagaaggtaactgactcctgcaagttctcctccagctttgacacagacactatggtatgtttcccctctaaaaaaataatttttaaaatataagctggagaacgagtgaagaagacacaccatgttagtttctgacagctatatgcatagctgaatgcacatgtaggcacaaactcaggaacccacaaacctacatacaactctctctctctgacacacacacacacacacacacacacacacagagagagagagagagagagagagagagagagagagagagaggagagagagagaataaaattcaaagtcagagaaggtatgttaagtagataacaatatgactagtaagagtgacactccccaactcatatgatcaagactggagctttccttcatggctgtccctatgtaggaagggtgttcttcagcagcggctgtatgccagcagctccttccaaggtccctgcatagaatccttactagctccacttccaagtccttatgtcccctttagaatactcctcagcttcttctcttttctgtccaaacattttgagggaaatcatgatgatgtcataaatgactggcacaattttaatccaaagatagctcaagcttttcgtaaagcggcttataatttgtgctacttatccatgctcctgatgatagcattacaatcactcacctgctcccacaggaatggccattcagaaggcatgactagcagcctacagtttcataaaatcgggtaactttcagacgtattaatggaattcccaagagtagagatataagatcataacgacatttcaggattaggagatatgtcatacacaccccatagaaggggaagcaatgccccagccatgtcctaaacggtttcctaaaatactacaaaccaaagtgagttctctgcaaatgtacagaggcaataaatcatgcacaccccaaacatgtcatttattgaaggttatttgttgctttctgcctctgaacagttcagctgtgtttaaatgatgtacatcaccattttacttatttattcctatgcagaaaagaaaagcgacaagcagaagtggggatggggagatgacagacaagtacgagcaaggagagaagtcactgagggagatgcagacaagagcacagatgtaagaagcagaagagtggagaccagaaactggctccgcctggttagcagtgcagacagcctggtaccaccgaagtggtaaatccagtgcagactagtcacgtacacctagatctcactaggatgggagtgttaaagaaacaaacataggtgaaaatggtcatgtttctgcccttatccagctcagagtttagaagcagaccctggtaaccacacacaccacagtgccgtgcgcaaatgttctgggaaacgggccgggcgttgtaagctgagaaccccacaaggggtagaaagggttcttgagaattgcgctatttgtgttcctttaggtgagccaaggaacctctttggatgtcaactttaaaagtgattatatctggctgcgtaccactagcaatcgtttagagattaaatgaaatcatgggtgaaaatccgctctgcaaactgaaagtcccacactgaagtattagcctgagtagtggctctcagattgtgggctgggttagcaatgccctatgagggagcaaagaccacccttaccctgctcctccctgtccctcaggcccatgccttagtacaaccaatcctgttccctacgtgatgttgacacagcacattccaaaatgtataacctggaaaataacatgaaatactcaccaatgtccagtcgtcttcatccttggtgtccagacaaagcaaccccaggaggaggcctctgtacctgggactgtctctcagctggattcgagagccctaacctccccattttctcatccttgcctctcttcatcaattcttcttttgccccctcccactccccctttccgggtagagatgtaactgatctctcacttagaacaaagtaaattcgacaatcttctgggagacccaggtctggagcagtggaaagggggactgtttacactgcggccagccaatccgagaaactctctcttagagctttatctgatgctaggactggactctcccttcctcctttctcccttccctcttttttccaccctctttctcagctaccccatcttctctctcctcccctcaccgacttgctttctttttcttctgattaatcctttctctcgctactcctgtctcctttcttctccggagaagtccatatcgcattttttttttcagttttgacccacccacctgccctgtcttagccccacctccaccttcttatcctccccacccccaccccggaccgtggctgctgtcgggacgactgacaaacttctctctatactgctgtcccaggaagagaagcagctccagtgtctgctcagcccctgatgagctcactggattttcgcgatgtgattggccactctagggctctgtggcgggagatcttgaaaagatgcttagccattttctttgtccctctgctctttccgtttgggttggagctgtgaaccccagacaccactgtagttcacaagagagtgtaacagcgatctagtcctaagggaggtggtgacgattgcccgggtaacaaggtttggttgcgtcaaaggaaggtgcagactgagtgaggcagaatcctgggaacctagtatgaagagttagaatctgagcacagaaggtaaggttctggcaagttgtagtacaacttatagccccaacgtcggtctttcttcagtgccgaggatgtctcaccttggaacatagagcgtgggatttgaaaccaggcatttcatttctagtctctcctcaatttgcaagactctgggcaagtcatttcattctacttccagtcgtcaaaagaggaatggcgatgccagcactttgcaaaggttaagggaaaggatcaaaagtgaaaatatgttctaatgtttaagcctaatgttgtgctaatagataacgtggtacaacaaaaagaatcctggataaagagtttctagtgctttgttttgttttcagttgtagtgaggacctgtcaatctttttggggacttcttgtcctcatctgtgaagtgggaaaactgggctgaatggcctccaagttctctgactccaacactatgtgactgacagataaaattgttaccatccaccattaagtggcccgtcagaggagagccttttcctttttcagaactcttgctaatgtctcactttctcttaggtttgttggtgaagcctagcccctcccacacccccacaatggaagtgtagacacaagctatagtagtgtgcacagggttcatccttgatgcaggttctctccccaggctactggcaggagcaggaattggagctgggaactctggctccactggacgaggccctcagctccacagtctggagcagccctgacatgctggccagtcaaggtgagataccaggcccttcatctcaatgttgtccagatgcctcactcatcctcacatcatttccactcatggaactccaccccatgttctcacaccactcgtgaccgcacagctttccttcccatttggcatttagttgttagttttgcaccaccaccgccacgttcccatgcaccaactccttacctcactctggtacaaagacctctgtaaccctacacctctttccaaaaataagatgcctccaggggagtggactgctcaaaacaaagaggtcccggagaggcattgtcagagacgaattcttcaagggagacaaggacagagggattagaggttagaaatcaatatatgtctattgcaaacgaagggcctcagacaccttccattgagacattttgagaaaatttcacttccaaatttgctcagtggctacacaataatctcaaaatccaatcatagtcttaattctcctttcacaggatcactttaggaagaactccaataacggcagctctgtttgaggatagaagagtcacagtgttgagaactagtagactgatcttaggagtcccttcacctctaatgccttgctgcctgtgcctatgagatgagggaattgggttcctggtcccagtgagcgcccccacttccagattttacaatcctaggcagtactaaccatcaggcttcattctccagttcaaaaactaccagtccttgcttggcatcatttccagcatgccgtacctccttagggccttctctctgctacaatcactcagggtgatgcaagtcaggtgactggaaaagtaagaaaaaggcatacaggtggggtccaatctgtggcaaagggagcatctgattgtttttacagtgctctggggacaatgtggtaagcatgtctcctggtttcctgatgagccatggatattgctggttgaggaattctgtggcatagagcagatttttggatgttcctgaagcagagaagggagatgattattttagattagttctgaggaggtcactgctgttgggtcactaaaagcgattctgaagatgaggcaatcaatattaggaatcagaatccatgctgtgggaactcagcccaatgcctggtgtgggaaacagatgtcagcattggagaggtttacagctaggcctgaggagaagattcatttagccttcaatggatttgtccaaaagatatctggatttctacctccctcttcctccctttcttctttcttttcttctttccatccttcttcctctctctttctctctctctgtgagtgtgtgtgtgtgtgcatacatgcttgtgtgtgtgtgcgtgcttgtgtgtgtgtgtgtgtgtgtgtgtgtgtgtgtgtgtgtagtatgtgtgtcttatttttgatacagggtgtatgcagtccaagttggcctcaaactcagtatatagccaaggataaactataactttttctccacctgtctctacttcctgagtaatgggataacttatgtgttctatcacaaccagtcattgtggtgctggggatccagtccagggcttcctaaatgctaggcaaggagcttgtgttttgtttaatttctctatggagaggggaattagaaaatatgccttcagcacattgaggagaaaacttcagtcttctgctctttaaatggcattggggtggtgaattgggtttgtatttggggagacaggaagacttaccaggaaagaaaacaaataattggatgtggttgtgaatgtctataatcccaacatttagaaagcagagacagaaggactttggtaaatttaagagcatcttgaatgcatagtaagtaccaggccagccaggactgcatagtaagaccttgtctgaatagcaggtgcaacaactaataataatagtaaaatccaatgatggatttgatgattgtgttgaggttattgctaaaaaaatttaaaatatgttttaactgtttctgtttttaatttctatcttgtttgtttggctttcttatatagatgaatgtacatgccaagagctggtttagacttttccccatttcagtttttgattgtcagttataatcgtttctaatggttttgctcttacaataggtggtgacaggaaggcaaaacataggatggcatatatgtatgtgtgttctcagtgatgaatggtagaaccatacctaaaaagacacatgtggaatagaatgctgaggtctgggtgccttttgttcttttagtgtttgtgaccctgtccgttcatccaacattcaacaagtgatgatactttctgtgtatccaaaatgagagaagatcaggtctgtctgccctgtactaccacaaccacccttcactcatgaagtctcaagagtatacagagaccagagccttgggtagcctgaattagatgaggtggctcagtaatgggtagacatcctcagggctcctcatgaaactaaatgtactctacccctgcagatagccagccctggacatctgatgaaacagtggtggctggtggcaccgtggtgctcaagtgccaagtgaaagaccatgaagactcatccctgcagtggtctaatcctgcccagcagacgttgtattttggggagaagagaggtagtatctcataagtgacctttctccatgggaatcatgggctaggagaaagggacagcagaggctgagggggattgtctttgtaatccagagcccgaggaacacaaggtatgtaattggaaaaagcaataaactatgggctcctcagtggtttacagagaagaatcaaaactatagctctgaacttagccatgcatagtcttcaaagtcttataaggtcctggaatgttattaccccaaagaagcacttaggagagctgatatcagatagccccaggccttccctaagtaattacacaagatacagattgtaatactggcctattgagctactatgtgcagtggctcatgaaagtcactgaatgattctgtcttaatttgggagtttttttttttttttccctccatccacaccactatgctcatctcttcccctcaatgatggtagcccaggaatggaaggttaacatgcaaggtacttgcagcatcctgactctcaattctgatttccacagcccttcgagataatcggattcagctggttagctccactccccacgagctcagtatcagcatcagcaacgtggcgctggcagacgagggcgagtacacatgctccatcttcactatgcctgtgcgaaccgccaagtcccttgtcactgtgctcggtgaggctcccaaacccctgtgtctccacagcatgctgttttgcaaacaaatctccctcagttggtccccaaagcatcccagaaccaggcaggcctccaatatcagaaaagttctgcacatttccctttaaatacaaggaaaactgagttctgatctgctgtacttactttttgatctgcaacaaatctctttaagcataaacttcataatttatagcaaagaatgggtcattccacttcattccagaaattatatgtggaaacacaagatctgtataaaatatcgaattctaatttctaggagaagttcttcagttgcttgaatacagctatcttcatcttgtattctacttcccatctccactcccctgagcctttcattatctgcaaggccccacctagctggactctggggtacccagtcactatcagcatccccacttcttctacatacttcacccccttagtcttcccatcttgtcctcaggaagcagatccaagaatcttgactctttatgctcccacccatcttcataaaccaaagtagagctcagatatcctgccccttatagaagacatatctaccgggagagcttggaatgtgacttcacagtgcctctccttcctctcctggccatcccctctccatggcaggaatcccacagaaacccataatcactggttataagtcatccttgcgggaaaaggagacagccactctaaactgtcagtcttctgggagcaaacctgcagcccagctcacctggaggaaaggtgaccaagaactacatggtgagtagctcccacctggggttacagggatgaggcggtgccgggaagtgggtgtgtgaggtgtgcctacgtatggcacataagaaaaaatggagacgaagaaagcgaatggcagacgcattgtagacatgtgtgtgtcagggtctacattctgtttatacattcacatccattttctaactttgtccaagacagactcagaatctgtggggcccagatagtaactatatgttaagatctacatgtctgtatatactgactgtgtatctcgtgtgcgtgtgtgtgtgtgtgtgtgtgtgtgtgtgtgtgtgtgtgtgtgtgtgtttctgtctgtctgtttctgcgtttcaggagaccaaacacgagtccaggaagatcccaatggaaaaaccttcactgtgagcagctcagtgtcattccaagttacccgggaggatgatggagcaagcattgtgtgttctgtgaaccatgagtctctaaagggagccgacagatccacctctcagcgcattgaagttttatgtatgtcatgggctttggggtgagaagaaccaggtgtgaggcagagagtgaggaaaagaaaagtgctgctggctgcacatgaggcaacatgaacagtcaaagtggcaagacttgagagaaacaggcactgtagtaagcattgcaggctcagagagccgaggtctttgtctcagtgagttgctactgcttgtgctgtgggagagcagccacagacagagcgtaaacaaatgagttgggctacattccaataaaactttatttacaaaagcttgcagctggcaaaatttagcccatgggcaaagtttaccagcccttgggctacactggtgaaatggaactaaactgtaacctacggtggtaatcatagcaaacgcagtgtctagggatgtagttactagtctgtactcactgcatgctggttgtgtggtgtgaagacagctctcccccactgatcttccttgtttatttgtgaaatgagagaggtgatcagggccgtcattgtggcctcttctcactctaagattctgtgacgccaagaggtgtgggcggaagagaagcgcaattctctctggtgtcaaaaagtccatgaacttttacttcccagtcatctctctattctccccggttccacacttggggttctgatgtaaggtcccagttgtcagcattgctgctttgtactttctctacacctcttcatcctctttgtggactctgcctttcataccagtagggaacatctgaagaagctggaatatttgcaaatttctcatctgaggaaatctagaaacttttcaaaggaactttcctgcatggaaaggaaagggaataattgaagtgtgggagctgagaatggaggcctatacaacaatgcatttcttttcctaatttaccaaaaggttgggcaattttcaaaaatagctagagcttttaatcttcttatggaagacacaagctgattagtttcctaactttggtgccatttaatcagtggctagaccttttattcaatcttaacattgtttaattttggactctaccatagtccatttggatgacactcaatgggcaggctgatgtgtagcctttagccaatgctgactagtattgccttgctagctatatcatcttgaccaaagcatttcatctctctttgaatacagcttactgccctgaactatactgacaacaaatggaataatatacatgaaataactacaaatttccaagttctaaatttctataaagtatttctgtatttaccagttccaagtgtaagggcctgagccttgggcagctctcttgagccctggtccccgaccataattgaagaatactctatggtattgaagtcctacagagtcctctcttagataccaggccatttggctattactctgcagggtctctttggcctgtgatcagcagtcagtccacaaatgcacctttccaggtgctctgctagagatctctttagctaggaagccctggaatacccattttctcacctgacctggctctctttgtcctgtaagatataactgaagttcattaactgcttgctaaggttggctctgtccttagggatagtgcctcctctttatctgtggttccaaaccagcatctggtcacattgttctaagccgccatctggacccagcctcttaagcagccttttggcatcaatgacagatgtcatttttccctcacggagccatccatattgtctcaggtctcttttgttttttccagctaaaatttgacccccaccccttgctgtctctatactcttattcttcgtttagactgacggttctaagggagattttgtgttcacacgtcactttcgcacctaagcttgctcacagagcagacagaattgagaggttgtggactcagtcagtgtcaagttcactttctttgttcctttaaaaatatgtattaggtactgtccatgtgccaggcagtttgctaggcatgaataaaccatggattctcctcagctctgctaagacatccggtaggtccccccaaggacaggcctgctggaatgccatcactcagaggttgagatacatcaggttgctctccgtcagtggcacgcactcacagtctgtgttcacaagagcctggaggaagaagggcttgttcacaggctctcagatttctgggacttcagggaatagactctgtagcatgtaactaggtgattccaaggttctagggatctcctacgcagagtggggagtttggcactgacatcatgtacttctccacagatactccgacagccttgattagaccagagcctgcacatccccgggaaggccagaagctgttgttacattgtgaggggcacggcaatccagtgtaagaagagcagtctgcagtttctgataccaccttccacactcagatagcctccaccccctgggtgcccacagggtcatgcctcctattcccctaactccacaacagcacctctcctttacctctactgcaaagcagcagaagtgagattggttccccgaaggaacaaagtcacagagagatacagatcaaaacacatctaccttctctaaattgtactcaagactgatgctcccacacccccaccaacacccaccctctggcccacacagcatcttaaacttcaccacgaagtttctgcctttcctgttactagtttgttttttaatacctctaaccctttggtccagggcgccctgaacacttccaatcttctgtctccacagcccccagcagtacctgtgggtaaaggaaggcagtgagccacccctgaagatgacccaagagagtgctctcatcttccccttcctgaacaagagtgacagtggcacctatggctgtacagccaccagcaacatgggcagctacacggcctacttcaccctcaatgtcaatggtatgcctctttggcttctctcctccaacatctcccttctttggccatctcttgctttcctgatggcaacacccttacccttgagtagtagtagggtggatggaaaaaggcccactatgggaaagcactgcacttaggccctagtaatgagtaacaatggaaattcaacagaaagatgggttcccactgtctctgtctgtaggcagtggctaataattcaggtgataattcaaccatttatcacctgacggggaggatatcaacttcatctagaggcccctcttgaggaccgtcctcctaggactagatatggcatgtacgccgccgccaccagttcccttcctaaggactctgtgtgcattatagtttggcaaagagtgaaagaaacaagcactcactctgcctagagatggtccgaacctcttctctaatgcttcaccttccaaaggaacaagagattgcttctttttgaaattctcaaaaattgggcccaccagacacctagaatattgggttagtcagtaaaatatcagccaattggagcaaaacagaaagaggcgtggtagataacatctgtaattccagcgctggagagacagagaaggtctatcccgcttgatgagcacacagctaatgagagacaaccatgaccttgttgtcaggtggatggaattcctgtggtctccacagttagtatacagacatacatggtcattagcacacacacactctctctctctctcacacacacacacacacacacacacacacacactttcaatatatatatatatatatatatatatatgataattcaaacccagctttaacccaggctaggacagaggtggctttagagggagctggtagggaaatttgttttcttgtttttaagacactaatggcattgaaatccttctagaaagtcttcaaatctttctgcagaatatgggaagtgttggagaaactttggggtctttcctcatttgaaatacccagtaaggtgaagaatggggtgtctaacacccaggatcccagggatgagaaagaggcctaagtgcttgggaccagatggtgattaggagtcctgagccaacctctcaccgcttggggtcacctcggcacaacaccagggctagcctgagagttacaaggcactgaaatctaggcttggcacctggatctctccagataatttctgatactgactgacaatgaaagaaagtttatgtgcctgcagttggtatcttgttgatccttctgccctgggataaaaagctaagcaggcctaggttgactagtttgctgccagtgctgacgcctggtggtggaaggagttactgcagcctctttaagaatctccccggtgaagacttgccaggaatgaaatgaaaggtacttatacctggagacagagggtggttattgacaatcccagaggtcattttgacagtggagggctgtgtttttccaagaactttttacatctatagattccggagtaaatatccaggattgactttaacagtgggccaagcctcgtgtttcttcactcatcttcccctaaatcatgtcaacacatgtgtcccaccatgaaactcctgggccaccctccatctccttcccaagaagaacattttttaaaaaggcacaaatgtttccttttcaattaaggtatagaaagtcaaggaactaaaaagctggtccagtcaagcctgaggaaacataaggtagggggaaaaaaaaaagtataggagttaatgaagcttcaagactcaagctgactccaagaaaaaaacaggagttctccaatggaggtgggagttatagctgtgcctaatgtagacacatcagagctgccttcggcttgtgtccataaacatttgggtgtctgaccaaggatagtgtttttattgacattcttggtccagatttcactatgaaatcagtccacacctattatggatggtgaattttgtacagtgattggaaggaacactagccattgtgggagagacaaatcaacccagtcttgtgcgcaaacatttgcatgatgtcaaagcagtgaggaacccgaggcctccttccttggatgggtgagaagcttgggttttactgaatcactaatcttccttgccaagaaagaattaccaaagaaaaataccagatatgttcaagagcatgtatgccggggagctaaaggaagaaggaagaaacacctgggagaggagaagccaaatgctccgtgataaggcagctgtatatgtcgtagcccaggctgggataaggatgctggggtagagcatggtgtcctgggctcattctagagaaggtggatggttttctaagtcctctcagaccataactttgctctctaggtaaatgtgcaagccttatacagggtggcacactctagcatcttcttggcaaggtgctttccaactgcttaaccctcaagcccatcagttttcgatgtttcttccccatctgatcttaagaccggaaaagtgacaaagaaacccctaaagagactagtgtagaataccagacaggatgtaagaagacatggaagacagtcaaggaacaaggaaacataaatgtctttgtgtgtgtgtgaggggggctgtaggggatacaatgggggcggagaagagggaagagggagaactttgatattggtcatagacattaaagcaattatctctctttaaggtcaaactttggtaccaagaaagcaacttgggttgtagaatgagagctggtttgtttattgcctggtggatgtatccattttctttaacaattactaccttgccagcctggtgatactcacttgagcacagactaaggcatgtccctgtgcttgcatatacctcctgggttctcctgatgttgacgtcttgtctgtgagattatccagggacaattcagcatgtgagttataaatcctcccctccccagttctaactgtatgcctgccctcctgcagaccccagtccggtaccctcatcctccagtacctaccacgctatcatcggagggattgtggctttcattgtcttcctgttgctcattctgctcatcttcctcggacactatttgatccggcacaaaggtcagaggcatcaagaggacttgggtggttggggagatcagtcagggaaggacagacagtaagagggcttccgacagggccctgaggctgtccctaaggctgttggagaaagaagtatacagccaacacatgtgatgccaatgctatgatcactgagcaacagcaaccccacagtcaagcctgatcacttggtaaacagccaagtacaatcagacctgcccactcagtcagctgctcctcctgctctgcatttgggtcccgcaaaccagtctctagccccttccttcttgcccttctcttcttttcaatctgttcagctgccttttctttctctgatctccttcctcttcatgttcatccatatcttttcttttctctttgttttactttctcttctattcttttattacatgcagccagcagcctaacttcctagactggtcatgtctaagtcatctcatctatatgcccccccatacacacacacacacacacacacacacagagagagagagagagagagagagagagagagagagagagagagagagagagtcctcttttatccctagcctacattatagatgagattttagttaagggtaggattcattattcatgggggtgtggtcaggtgagggatgctggcagcaaaatgcaaattagagaaggtggggtggaagaaagctctaggcaagagaaagatgagatgagcaatgtgtgagtgggtgggtaggaaagtgggcagggcggacttcagaggctgagaagcttctgaacagcggagcttctatctccacacaggaacctacctgacacatgaagccaagggctcggacgacgctccagatgcggatacggccatcatcaatgcagaaggcgggcagtcaggcggggatgacaagaaggaatatttcatctaggggcacccactcacctcctgcgcccctcgggggccccatggggactgctgggctgtcaccaacctggacttgtacagagcgaccccagggccgcccctcccgcttgctccccagcccacccagccccctgtacagaatgtctgctttgggtgcggttttgtactcggtttggaatgggggggaggagggcgggggggggtgggtcgccctcagccctttccgtggcttctctgcgtttgggttattattatttttgtaacaatcccaaatcaaatctgtctccaaggctggagaggcgggggccatgggggtgaggacagcagcaaatgcaatgttcgcggaaggaagtcggagggatgacaaatatttgaatgaggagcagggctggtttgcaggcgggggcttaacactgccctccttccattttcacagcgggtcagcctcccaggtgtctccgaggaacctgggtttggaagcaggagctagtggtggctctccctctgttagccatgtattgtgagctacagacagggagacaggtgtcaggaggacacccatcttccattacataagaaagggatgagtaggagagagtcctcaagacgatgtgaactgaagatggcatgcagccgcacggggatccagggcttcaacgtgtccctcccagagagagtagatttccagagagagggtgaaggaagtgaccctgtccatgcatggcccccacatgaatgaagccaggctcttttcacagaatcggcccttgggggccagcagagctcagctttctctcctagctccagcagttgtggaagagcactgcttgtgggctggacagcgtctgcttctccctcctcggaggggcccctcactcttacccaagaccctggactgttgcacggcaaccgctcctctcatggcattgctcagcaactactcctccaccctgtgtcaccctgtgccctctcctgttccctgtgccatccctcagtccctcctccctcagcagccaggcagacatgacaacaaaattactaaaaggagcttcgctgcagtgagctgtttcctgcccaaaccgagggaataatgtgaactctgtggacgtgtgtgtgtttgtgtgtgtaagtgtgtgtaagtatgcatgggtgtgtgtacatgtgtgtttgtgtgagcaagaagcaaagggatcaaagaagagaaggaccaggggtcttgagtaggcgacagggcatggaacatgtgaggcacgaggtgggctttgggagtggatggctcctagtcaggatttgtacctcatctaggggggctgctccatcctagccatttccaaaccactcttgatgcctatctgagagagggggagtcccagaatgtgctttgcccggctgtgcattttgtccctctgaaacactacacattcaccactcttccctggaccctcccatctctgagccatggagccagggccacagcctctgctatgcacccctcaagcctctccctggcactgactctggcttcccatcctctgtacccagtgactagaggactaggaccccatcacagtttttggtttactgtcttccttctatggccaagctggttgcagtggagatgagattgctcaccctctctatcctggctggcctgtccctcagatccaggatgctcttggcatccgtctccctctcctccagcatgtcctccctcctctgacaacaggtgtgcaaagtggggcagctgcaatccagcaggcctgcctactccttcagttcaggtaacacttttcgtgaatcttccagctcctggttagggtcctgggcatcccaggcagcccctcacttaagccagggattctcctcttagagcagcaagggagccctgggccccaggcctgttcaggctcctcatctcccagcacccgcttttggggaaacgacttttccactttgagctgaatcactctgtccatattacacagaagccatatttgtaccgggcgggcggggggagaagggccgttgtgctgtgtgtgtgtctgtgggtgggggggggggcggggcgggggaagggagcagggaggggatcgtgtatctttataatctttctaactctcctgtgctaatctcagagggatcaccctcaatatatctggattatctgtgtgatcaggctgcctcctttctgctattctcacctctggctgggctgcatgtaaataagggctgtcctcatgtccctggcccccggcacccaaaggtactgcatccttgccatgcctctctctcagagcatctgtgtgtagaatcaagagagagagagtgtctgagtcatttgctttcagaacttggggatttgaagctcgtcatcccattgctactctgctactctctgcccagcaatgctggccaacaccatgatgggggtgaagaccccaccaacaccatctaggaaagagagcttcactagtttgttttgttttgttttgtttttgccaaactcccttttctagctccttcctgttcaacctgaaatttgacctgggtacccatccttctgcactccagtctgaggggattaatgggtatccaccagctaaatatgtatcccgtgtttctcctggccagagaaataacaattctacctcccatcagaaacgtctcttactgctaaggtgacaagccagtgaagcattctcacagtctgtatgtctcacaacaatatgaatagagattacccagtgggctatagtctcacattaaagtacgctgtcccatggtccctcggagcctatttcgatgtgtcagaccatgtgttctgcttggtgtgagagacgcattcattgagtccatgggtggtaaggcaaatgcccaattgctccctgaaggagagtcaaaacacagtcttgacaggcccccaaatcttctatccctcttatactgaagtacccatacccctagatagcagagcacacacccaggcaccacccaacagctagcactcagataggggcatactgaaacccagctagggacacagataaacaggtgcatttcaccgctccttctaccacacacaaaaggcctccatttaaaagcatattctcagtctggatggagccaacagcaaacgccatcagcacaccttccctgcacacccgggaacttctgaactctttccttggatttcattcaaaggaatagagaacagagagatgcccggtcactccaacttcccagcacctctctcttatctctgtttcatatgtcacccctggcccctcatccttccttgttcctgaaggatcctcccttgctggaaagctcactgacttttccttgccatcattgggaaaattccccctttgtggccctcaccatgttattttcccgaggtcattctgaccagccaaatccaacaaaacaggaagccccaggacagtaccctgtgttagcctaaggtttaagtaggcagtagatgttgggcagagtttcctgagtgtgacccacacacacatcctggctctgcccagaccctgagagtgttcattagccccgggcacttatcttgagccacagctgctgacagagtcctggccctgtactctgcctgccctgagcctgcagtgccatggggaactgtctgcacccggtgagtgtggggaccatgctccataacccttgcctctgtcccattgtcccattccttctacttacttctctggattttatgctcttcccttttgactatcccttatccctgtgtttcttgatctccatttcaaaagtcttttccctttctttttttacctcagtttcctgtccccaccttatttgttctctctccacctcttagcaaatcccatgcaggtttctcctcatttccctacatccttctgttcttctaagtctctgctcagctctgaccagacttctctgtggctttgaccatgctgtgtcctcagctgcccctttcaccatgcccactgttcccacctgtagacagatcccctgttctccaaaaacaagtgtaccccagcctcttcactgatgtgctagatgccctccctccctgactgactgtcccttctgggtgtaccctgtaggtggaaacctccttttcactagacgagaatggatctcagttttcttcggagttttggatttattcttatgaagataatgccacctatgaagtaatggataacttcagcattggagcagctgctccctgctactcctgtaatcttcttgacagttcttcactgcccttcttcatcctcaccagtgtcctgggcgtgctggcaagtggtaccgtcctcttcgcaattctcaaacctctctcccactggcagatctgccccagctggcctattctggcacagttggcagtaggcagcggcctcttcagctttgccgtgcctgtcctagcaccggggttaaacactgcccatagcacaggcctgtgtttcctaggctactggatctggtacacgtcagctttcgcccaggctctgctgatagggtgctatgcctgcctgacccccagactgggtataggtcaaatccgtagccacaccttgggactcactgtaggactttggggagcagctctcctgttagggctgccggtcaccttggccagtgacgtttacaatggtctctgcacccttgcgtccaacaagcacctggaagctttgaagttcacacattctgcaatctgttttaccatcttcactgtgttaccactggctcttttggcagccaagggggtgaagaaggcattgagcaaggggccaggcccctgggttagtgtcctgtggatctggttcattttctggtggcctcatgggatggttctcttatatgatgccttcgtgaggtccaaaacagtgcatctgcaatcatgtcaatcccagaagattctagatgtgatgctgaacctggcagaagccctggctgtattgcactgtgtggctacgcccttgctcctggccctgttctgctaccagaccacccgtagatccttgccttctctgtccctccctgcaagacagtcttgtcatacggatgcctttgcagttaaatcctagttctttccccacatgtcaacctaaattaaagtctatactgcttttatgaagcgggtgctctcttatttcatctggagttaaagagaaggagaaaggagagcaatgcgtgcctgactttcctgtttctagagttgtcttggaagaaagagatggagggttaacatcctcagggaatacagatgttctcttgaggtgagtgattactgtcttcttgtgggaacagaaaagagaaacaatagcatgagtggagaagatgaactctccaaacaagaaggcaaggcttaacaagcaaaagaaagagaagccatttcagagaataagtggagtaggcatagaaactgggggtgagggcagaggtgagtggcagagagaaagcccaaagcaatagtgctgctctgccttctgacccatccaggtaggccttatcttctttgtcttctctggctttgtttggaggtcagagtggtggtaagaaatgaaagaggcatgctcagggacattgggaagattggggagcagctatcctgttagggctgcagtaacattggccaatgatgttaccatagcctagtctagggcatatcccaagagagtgcaaaataatgcttcctaggaaatgtcttttgcaagttaattcttcatcatgaccttaacccccccaaccttcccacctctctctctatccttctcactcttcctccctccctccctctccctccctccccattctttcctccctcccccctctccttctctctgcatgcatgtatgcacacttgaagggttttccctattactgtaaccttgattcttctttatgcttgtctctctctgtgtgtgaatgcatgtgtgcttgagtgaatgtgtgtgtttgtgtgtgtgtgtgtgtgtgtgtgtgtgtgtgtgtgtgttcttacaggtttattcttcatcatgacccttaatcccccctctctctttttctgtgaatgtgtctatacatctgtctctcaatctgttaggacccatagtatccatgttacaacagatgcatccaggcatgcagtgaagcgtgtctctgcatgagctaacatctcagtcagtatctgcagtacacatacccatgtgggtgaacaaacctcttacagagtgcccttcctaacttacttctgcacctcttcagggtgtgagggcagaaatccttagtcagtaagttcattcaccttgctgtttatatccagcattcctgtgtgtggtgtatagaagaaaaagatcaggaaggtagaaatggtgaagcaactgaaagagacagaccctgatccaatccatcttgtggctcgaattgcccaagtttctctttcaaagcgcagctctcaagtgatacctttaccccacactagtctttttctctttctcttgtccatctagtatcctagagcatcccctcacacacacacacacacacacacacacacacacacacacacacacacacacttgcctgcttctctgtcagtttcttgcaacttggaaaggttgtcttcatgccctgcttgactaagcttggtagtgtttaggaggacagcaagcaagactctcttcatatggagcacccctgccggccacagtttcatcctctacctagaaagaccacaaattgctccctgcaacacaccttaagcccacccagaaaaacttgagtgggcacttcacatcattctgaatctacttacagtctttccatactttcaaagatgctctctactgtcttcctccctaacatatctatggataatgttctgggtttaaggattgagagggaagtgcaggagaggggcgggggtgacttaaaacatcctaggctggagggtgcagaaggatcagggaattttcctgggtgggtgccttgacaaagactctaaatctccctcctctggtctcttagcaaccaccaggtttagctcctgattggtgcatcataaattgaaaggcgggattgtgggactgactgagacgcgggagacattctgaaacataaaggaagagaaattaaatgaggaaaaaggaaataatttacaatcctaaattatgctcaggtctccagccatagtgctgatgactgtgtcccggtgttttcattttctatttcctttctagttgcattttacaggatacacacacacacacacacacacacacacacacacacacacacacacacacacacagagagagagagagagagagagagagagagagagagagagagagagagatagccctagaatctccaactgctcttgcaatcattccagatgttgctttcctctcttacaagggactggatttagaggttgacctaatttaaggggcagtaaggcaagtcatccaatgctcaggggaaacttggcctaacaccactggggttgtctgctctaccttgctcttatactcccagctagatatccctcctagctcagtggggttgagaaagtcctagtgatagcccacagctatctcttgcaaagggatggcagaaacagaagccagcaactgataagaggtcacagggggttggaaacaagaacacttaaagttatctcctcctcaccccctcctccacctttgctgtcttgctccaggccctttgggactgccctttccctgccattatgtggactgcagctggccagttcatccttatgtctaactctgacctcagccaactctagaagctttccttggggacccactatccaaacccatttaacccaatgggtaccactaaccactctaaattaggttggtacctggcaccttttgtccaacccttcaggaatacaaatcctgtttccttagaatttaatctaagggttggcagggattttagctgtgtatgagttattgggcctcttggctaaagaaaaaaattctctaagaaagatgagagtcaggaaaacaagctcttgggaatgcataaagccctggggagggtcaatttacattaaggggagatttcttttttcttgaggaaagtttgaacatcacattgatgcttataattcattcatttctggctgagccccacaccctagaggatttaggaaacaaatgcatgtttcctaaatcctttcatctgccaccatacctctaccctccttccctgtctcccaacacctttcttctgcagcctccaaggaattctcactgagaacttcactgggatttcaaacccaattcatcgccaactctaattgccaggaatttgcatgaaaaccatcctatgctatctaattattctgacaacagcagtcctccgtctgggcacgaggagaatcgcagttttaattaacaataatgcaccttgcagatgaacgtggctgtttaggttaattaacaagtccaagtgtctccaaatcatcatctagacatttaggagatttggatgggagaggtatggagcatacagggggtggtggtatttctttttaaatcaattcagaaaaacatttgggttggtttttatcccttctataatcattggatgaagggaagagggaatctcaaaacagaactcccagatatctgggttaggaggatttggggagggcacattgttgcaggagaacaggcatcttgtgccactcttacatttagaatatgctttccatacttctaaacccatatctctcattccttgtctagttgtttgctaatttgattcctggcatgagagggccaacttccctcattgtttccactacttgctactttgccttgtgcttctttagcacatttggggcacctaaagttgcttacacccaaagacgtccacacagtgtcttaagtcactaccgtatctcccccatcaagaatgattatttgcataaatgtcttaaatagttttctgggtgctggaaaaatatattccacatagctctaagtggcaccctttctctctccagtattgctgataccatgtgccttgtgatccccttgaaatcaagtcatattgtgggagagagaaaaagcacacatcttagaaagtctcatgaaagtcagagtctgtttctaagaaccatactatcatacctcaaagttgggatttagttcccccacaccgctcgtatgctcttatagttcatggctatcacagtgcccactgtctcaactgctcttacagttcatagctagcactgtgtccactgtctcagaatatcagttattagtctgtgacttggcttttcctcttgtccttgaagttttaatcctaatggcagtctctcaattctctgaatgagcaagtcccttctgcatgcctgtcatatatatatacatatatatatatatatatatatatatatatcagaactctttatgtgactgacattccctaatcctttaggtctcagaacaaacaccaactccttcaaatctgaccaagaatccaaaggaatacagctctagctctctcatgaaactcatgctttctgtaccaattctcttggctcgtgtctctctctttctggtttactttggttttatttttgtgtgcatgtgtggaggtggatgtctgcacaggtggaggacagaagagggtggtagatcccttggatttggagttataggtggttgcaagctatgacataaacttgggtcctctataacagcagcaagtactcatggaaacacccctgcctcagcttcccaagcctatagtcaccctgtgttttcagtcaaccttctcctttccagtcagtttcaaagctctggtcgttgactgccactctcactgtacctccagcaatgtttttctgggtaaattaatagaaagacaagttgggattccaggcatgagccaccacacccaattgatgctgtttccatagcagcaagaatcccacatcaacattggtcttggttatgcacttactggtctgaccagtttgcttcccatccaggccttccctccactaatagatatggagttccaagagtgccgggccttggcattaacacaatcagaaatcagtaaatatttgataaacacagaagagaatgagttaattttgtatgaataaagcaaagtttcccacactggagggttcatagttgtctggtgctgacaggaacagaaacaacaagcaaatgattggtggagaaatctgcaaaaacaatcaacaacaacaacaaacccttactttttctgcgttgtgcaaggcgtttttctgttgttatttaattaattcaggttctttgaatccctttttgagacaattcatgactgacatgactagaggacttcgctacagttattgaaccacacaatgaacaaataatactctggttcatttgggggcactgctaggcttgggacagccaggaaaaggagggaaaggctgtaatatttcatctgtacttgaggaaaagtgaatcacaggacactccctgaagttcttggacgtgaagttcttggacatgaagtcttccagtgattccaaatcatattcaaagtccagccacctcctcagttttcatcatagtccagggaagggcctgcatttcccagaaaagaaaaagtcattttgatctacatagtaactttcacctagttttctctactaagtaattttaatttagcatgcccttcagtcttaccccttctctaccttcaaaccctatgtcctttcctcaccttttgttttcagtgaccctcatttgctgggggcagtttatctttctcatgttctagatactttttaaagcatataatgggtataattaactttgtttatagaatgtacccatcaagctgccatgagaccgatggggagacacagaaggaacatttgcagttataaacaatgttgtcttgtctgacccatctggtccttttcttccttccttctttcctccctaatcagggtttctcagtcttccactgaacaacattgagcttatttggattccaggacacacatctccagagttcttagtccccagatcttcttagataggcttcttcacagctgacctcagaactaccactagtgcctgtctcactggcatatttttcccaagcagacccagagatggacatttgctgtcatacacttttctgaggtggttgtggtagattccggaggccagctacacggagcagaaggaacaagtgtggcgcttggagcaaaagcttattgcaaatgagttggctcactctatttgtaacctgagaaaggggaagctgactgattatttttctcaacctagaaacttccccaaacagcctcggttcccaggttctgaccaccccctcatgcctttccagctttggtgaggggtgctgcttcctccccagatttagttaattgatgggaggaagctcacagaaagtaccaggagtgtacaaagagcagacggaacgaaggacaccgtgttagcaaaacttgcaagaattaaataaaatttaatagagacggatagaaaacctgcctttaaaacacacattgcaaagaatagaatggaagagacctggctcaacaagcaacagtctttatattaaaaacaacaaccaaaaccaaaacaaaatagataaaaaccttagatgcttcacttggctacaagctaaagatgactcaatagtgtgtgtggcagccaaaacgctaatgcagtctccaactgcattaggagacgcagcatccaggacaagggagggcgtgatgccactcatgccctgacaggatgtgtacagaatggagggctcagatccaggttccatgtgttgaaaggactgctagcaaattaaagctcttaaaagatgctgatcagaataataacgtaagagaccatgctttggctgcaaggatggtcaaaaggagtgccttagagggtgtggaagaaagaactgccccgtagaagtcgagaaaacacctctctgtgttgaagttagtgaaaagttgggctgtggggaaaaaatataagagaggtgtgtagcttcagaactgggtatcgtggatgagatgaagtaacaggagaaccatgagggattaacttcaggcaatgcaatctatggtagaatctgtgctgcagagaggggttgtcacactgttgctgttggaagaaagaagggggggaggacagatgggaagagaggagcctccccaactcacacgtatgaacagacgtggctctatgttgctttatgtcctttttagtgattaactgaccagatatgagccacagccttatggtgtctagagatcacagtcaaaggcagatattaaatgcataaacacagaaataaatcacaaatgttatgggatgaaagggctggtaagaacgtgaataagaagaaaacaaaggacagcgttaactaatgctataatttttatgctcagaaagagctcaagctgaggttgggcaggaggaaaatcagaaggcagcacagggtgccctgtccttagtgtggagctgagagtgctctaacaactagctcacaagagcaaggggcagatcccctgaaggcagctttttcaatcatggtatcctcgactcgaccaaacatattctgattcaggttacttagcacaaaggagccctggatccctctgaaaatatgttaaatgacacagctagatgaagctgcatttctttcttttttgattcagattcccaggtctcacgttgattttaatctctgtttggattctggaattaaacatctgatccaaagctgaatctctgtacctggctcatagaacaataagggaatccttagccagatgtggacctgacctgaatttttccaaaaggtggggaccattcctggcacaaattactgcaggaaaagtgttgctggtgcctgggggccctctagtgttcaggaactgtcacttcaactttactcctcccagacccagggtgggtcctaaaatctactgttaaaggctctaaaacagagccaaaaaaaaaaaaaaaagtaaagaaacctaaagatgtatttttttaaaagttattccctgtacataatgttaataataaaggtgggagatcacaagaattgctttccaaattcatttagccccctttgccttgcattgggtattctaaatgtaaacaaggagatcgagagattcacaagctttgtggacgtaataaacaattctctaaggataccagacattaattgggaattccacaggtcagttttgttcttcgagaagatacataatgtactagtgttaggtggctgaactgaaactctgggtagaggtggagggtgtgggtcctgccttctgtgctgcatcatccacttctgaattctccttttcttctctgggaaaaatcatggcacttgccctacttagctcataggtctgatgtcaagaaaaaatgggttgacagatgttgaagatgtaaaatcagttacagctgggaggaaatatactgtaattagtattaaaaaagagtttgccctgcaggtgattggggaaatgcctattgtgttttgggatcattccaccgaaacatacattttttttttttaaatacatgagcatatgggaaatgaacttttggaagttacacttccactgttatccttgggtctccactcatgaccacggagctacaaatctttctgacacaatgtttaatatcaaactacaaggaagagttccttttaaaagggagccaacaggtttggaaagatggtagtggtggctggttggatctgggcttgttgctacctttggactgccttgggctacattatagcattatttagagcagatcataaattgttgctgtcctgccaaatagcaatggtccctctgcgattcccttcatcatattaaccttacttaaagatcttaaaattatcttattctgcccagaagtcctgaggttcccttcccttgtaggatatttagtgtaggaaggtgagctcggggttgttactagatgaacgttcctgcccaggagctgaacgtgacccatctcagcaaaaagaatgtaaatgcctcatgacctactaatgctacttcaagtgtggtctgtaaataacgacaagggtgtcacctaggaacttactgggaatacaggcttttagacccccacgccagatgtgctgctgagtcagaatctgtcccttgacaagatcctgtgtgatgtcgttgcacagtagaatttaagaaggactcccgccattgcttggattatagcaacctctctggggcagagtccagtcttctgcaggcctcccaggcttcagttccacccactctaaaacaattctacctggagacaaagcaatcattagaatgtgtcaatcgggggcctgagagatggcctagaggtttagagcaccggctgctcttccagaagactgggttcaattcccacctggcagctcacaagtgttggtaactccagttccagggcatcagggaacttgacaccctcacgcaacatgaaataaataaataaatcattaaaaaaagaatgtgtcaatcaattcaatacattcctgaggatcactggcttctgatcatcctagagtaagaccaaatttaggatagctcccatagcatagctccacccccccaactcctgtactgacccctgaccttgcccttcatactaatacccagacaggatggatgaaaaccatcccttaaaaacaaggttacctcctcgtcctggtggctggcttggtgaatcaggtatgcttgcttgccatgtgctcccagagaaactttggcattcacctgtaaccactgtccttgtggattgctcccacaaggaagagactgtggttttcttgtcttttgagttctagaacctagcccaatgttagacacagcaagcattttaaatgttgcatgtttattattattaagagtatattaatataatatacttctttagtaaagaaaatgggtcattccaatcagaagtgaagcaactttcccaagaataaattgttagaaatcgtcaaaatctaagatctgaacccacgtctgtgttccaaaaagacttccagtctcttgctctttctttctcttgctttcagatggtagtgagtcatagcacacacagccctgatgctctagttcacattatatattcagatgcgaccttctgggagagagctttcagtgaatcaggttcattcctgtacagaagatggctgaggcccagaaacatggaaggtttccctttgtgttcctcaatgcatcagataccatctttatctcactgtggtgtgggcagggtgggatggcagccagtggggatgaagtaggcaaagggagtctgccttctccacatcagagcaaactgagccaagccatggtgtatgtaccattgtggaccggggtgagtagaagatggacaaagaagctctcccctcagctccaggggaaggctggacagattccctcactcagagcccacttgcttctggcctcaccacaaggggccacatccagatggagaaaatggctaagagggcctagcatttgcatacatttgcatatgtttacatactcacataagaacaagtagctcattctccagcagttttcaagtaaatgtgaatattgccaccttcaggttgtcatggatagattttgctcttctcaattgccttctgagccctggttctggacatgccgagtgtgtagccagtgccatgggaagggtactgtttaaaaggattcaggagcacatcacagggcacaagcaaagaggtggcagggacagcctgtggtcagggcagctctggcaagcacacctgcactccatctccacaacacacctcagaggctgttagctcacatctgtcctgttcgtgcgagaataacagctgcactgattggatgttctcagcaggcaacatgcttttccactgtgaaggtggcaacgcgacagtgaaaaccttttgtgacacaaagatggcgggcagatgaagagcattgcatgaacataagctgtgaagtccagcctcagcttcctgagccctttaaataatttcctcgtcactgttacactaaatccactcaccttttctcaaggaactggtgtttcctactgttcagctcaggctggattcttcccaatagacttttaatggagttggggctgaagaagaacaagagactcagggaagccctttcagtctttcaggccctcagatagctcccaggcccctctgggtgcttagagatccacaggaaacaaaaggccaggtagttccctacacctcttcttgtctctgagaggaggagatgggggcaaactcagtgggttcctccccacaggcatcactgagtgtttgaaggacttaaatgagagtgccattttactgacttcacagattcaaaattctcctgtctaaatctgtgaaactatgagtggacagatatcttctgggagcctcagtcagcccagagcctgctatgctaccatgttcattaccatatgagttaccacaaacatttggggaacactccatgatcgtctacgctgctgttgagagctccagaaactaagaaaaatgaacagatccaccatctaggaatgcagagtctataaagaaacttgaaatgtttgttaatatttaatagcagaaggcttgcacgcagtggtagtcttagtttggactgactgcaataataaaatactgtacctttaatggtttatagacaacaactaggaaatctctggggtctcttctataggggaactagccccaaacctttacttcctagttatttcctaaactcatcacttgttaaactctcttatagggggtggactttcaatgtatgtgtgggaatggaaggaagcaggcagggtacagacacccagtctaggacagtcattgagaacaaagatagtacttagagatcaaagtccaaacttccctgagtctctgcagtcactaaaagtagagtcagaagcctctgttacataagagttacctgtagggttaacttaactggtgtgaaaagaacccagcacactatttggcactaagtaagattctaagacgttaactaaataaaagaaaggcataattaggtactgaaatacatgactttgagttgtatgattgtcaaaattacaacaacagcaaaatctctacctttaaaactctctaatccaatgtttctcaaataattgggtgtggattgttgccagttttgattcttttttttaaacctgggtacaacaaaatgtaaaagcagaaatacaatgcagtggtgaactatttttttctgtggtgtgaaaatccaggtagtaagatcagtaactcatttgtaatcactattttgttcataaaaattaaagaatttaaaaccctttcattgacagagtaacttaccacgtcatcagcttagctgcactggaaacatggttctagaaatttctatatactctagagctcagacatgcacaagcaaaaacacgtcacccctctgcaggatttctcttcaggtctttaacgataggaactagaagggagcttggtacccagggtagagccttcgggttgaaacaattgcacctctgctagtaggtttgtttccatcggaaccatcaggtgggttaggaacatttacctctggagaatgctgtggggatcaaggaagacactggtgaggtgagaacatcagaaatgatgaagtgctgctgtacacaggtggtgtctattaataagactcaaccccacatccatggttttcacaaagcacggcctccagcatcagtttctactcctctgaacacaggttgaatatgattacttaatgctatctctaaagcagtctaccaagaatcgagcataatctctgacctagctgacaatatggagaaaatgaagcaaagaactaggttgggttgaatggtctttcggggacatagatggattttatggttggttgtcctatgtgctttttaaattgggtactccagtttgatacagcaatttgagcacaaatggatcttgttttctttctcatcagctgatattcctaagatcccaaagaagatagtgttctgaagaaactagatttattctgtgtactttggcttcaagatttcaacagttttaaagctgtccttctcaagttaaaaagccttctatttggagaaaatggcaacacagaataagagtttaatagatctgtcttccttttctttgacatctgtttccattttgccactactataacctctcattatttcttctccattttacttggaattttcttttaaaagctatttgaaactcttgctcccactcccaatctatgcattctctcctgcctgcgacacagtgttctgggagttgtgggcagtggtagaacataaggattatggatatcagctcccagcggggcattgatggcgcacgcctttaaccccagcacttgtgaggcagaggcaggcggatctctgtgagttcaagggcttgcctggtctccagaaccaactccaaggtcagccagggctacacagagaaaccttgtctcaaaaaagccccctccccctcaaaagaatgtcaactccagcccagcttacttagattcaagtttcaagtttgccgcatattggttttgctcacctcgagacagttactactttgtttcttagaacctgaaaactaaagattaaatagtatatctgctttgtgtttctctgaggaatcaatgatttaatatatgtaacattgctaagagaagcactccatacacagtaaatacacactgagtgttaacacttcattgacattccaggaccttgtggacttttggatttcttctaagttatgctccctccttataccttttgtacaagtctttattcaatctgagttcatcaaagagatttttatggatccccatgggttttgttagctgccgtctcctttctttatcaggataactcatgattattttatttgaacttcagctcttagaagtgcccatcccattaaagaattccattattattttgaatcacaggttacaaggtcttaattctttgttctgaacttccagaaagctgctttcttagtgtctggaggtacagcaaaagggaatatcttcattcgtttttatatatcacacccatttacaaaaaggaattgagattcttgctctattttaacaagggccatcctatcacttagtattaactttgagaaagagcataaccactgaccctttggttgaataccatatacacatccttatttgggtcctctttactggtcataatcaaatcttcagtagcagcttcccctcactgccttctctccctactgagacatgaagttgtcagcaagaccaggcacgaatcaccagctgtttggcatgagcctttcagcagatgccaggctagttgaagttccctgtccccagtaaatcttgcctctttgccaatttttgcaattcagggaaaagggattagaacgctatctatgtgccaatttgcacatgagactgacttatctcctcctagacaatgaaagttactagaagggtccttattctaaatagccttcataatggcctaacattctactacttgttagtcaactgctgtctagcctatagtatcaattttataaggcatgaagcttgaaggaattatgttttaggctccttggtcacctaactgcactcattgagtcagagcatctgccacatctccaccaagagctaccctttatccagaatgcccttggaaactgtaacttttttgggttcctggtgggcttcacacaactctgactgatgctggaccttcgtacccctggatgatcattcaattcagtctatctgagatattggtgttggtttgttagaaacatttccacacatcttccaccttcagagtatttttagtaccccaattagcccccatgtcagttaaatatggttatttgcagttgtaataattgtggtcagattaaacatagcttccctgagggcagagggcagctttccaaattactgcaggcgtcaatggaagttagtaaaagaagcacaaatgtattgaaaatctattatgtgtcaggctctgttgttagggtaaagaatacaaagatgaacagaacaatggaagctcttaaaaacgtcctacacatagtggatagaggcataaaaacagatcatagcagcttagtgtgatgagtataatcctgctaggtgcagagcacagaggaatggccccaactcagccagggagtgggaaggacagaaatactgattggcaaggtttcttccagtcagccccaatacaggactccatcctacagcttagtaagaacagatgaagcttttcacttttttagagggatatctttgctatgcaaagtgaagcctagcttgccctcatgtttggttaacctttgggtttaaactgaccagaagaaattgcctgtctacaatctctgaatgccccagccaagtgcctgtaagaagaatggatcagtctttgtcagaggggaaagtctgaaagaaaaggtgaggggacttgaagacagatgagggaagaacttcctgattgagtctgtgaggtagccatgagccaagccaagcactgaaaaggcctgggttggttgatagaagagtgagtggactgcctgaagaccattccagaagaacgtctgagtgcttgctgtagaatcttccagcagtgtcttctttagctggccattccacatttgaattcctgatcattcttgtttcttgggaacttgaagtcaatgcaaacaatctggtttctaccttgaaattttatcagccattgtttttgtttttcattttatgtggtctatttattttaatcagagttttcataatatgcaaaagccttctctatgattaaggtgtagatgtgagtgtggctcaagacaacatggcattcattccctacttgctccagtttgcttatgaagaaacattctttattatttttcattttgtacatatttaaattaaaacacaattgcatttgtttttattggggaattgagtccattaatacatttttactttttaaatttaaattagaaacaatcttatttcatatatcaatcccacttccctctcttcccatcctcccatgcccccccccatcccatccctcttctgctccatagaaagggtgaggccttccatggggtaccatcaaagtctgtcacatcatttgaggcagggcctaagccctcccccatgtgtctaggttgagagagtatccctctgtgggtaatgggctcccaatgtctattcatacactagggataaatactgatccactgccagacgctccatagacttcccaggcctcctaacggacacccatgttcagggggcggttccatcctatgctagtttcccagctatcagtctggggtccatgaactctgccttgttcaggtcagctgtttctgtggttttcccctagcctggtcttgacccctttgctcatcactcctccttctctacatgtgagtccattcgtatttagaactattaatgaccaatgatttgttgatgttgttttaacattttattctttgtggattttacatcattcatcccaatcctactcatcacccatcccatcctctcacctctcccctttaaagtatagcctaaaaacaagacaaaaaaagaaaatttctgcttggaagtgcagtgtggccagtgagtcaaacagtataccccttagcccatacatctttatttgtaaatgctctttgaaatggattgttggcctgctcatggcctctggcttctgctaccctattgatattggggtctcactagaactcctcctggatatcttgttgtcttctgtcatagagatcctgtagctttgaatctgcttatctggccccttcacatactcaagaagatcatacatgaggtggatgtttgggtagggtaactcatagccctggatctggacctgggctgtagcttggttagtcaactcaccagctttccctcatcctcatgaccagggtgagctctccagcactgctccagccagcttacccaatgcaaagaacccctaggagtaggaccatgtctcctgatttcacacactccaggtcaactcacctgcacaaacaccccccacccatcacctccccgcctcatgcccagtcaagagggtcagctctactgtgctgcctaggtgaggtactgattctcctactctcatgaccccagaatcagctctctcacccacacacgagtcaagggggacaggggataggggagttcttctctccttggtccactccaccatatgacaggtgaggggtgtggctagattgcccacccactttctcaggggtggatcacctgcatccttgtctactgtgctgccttggcgaggtgcaaggcatgttctttcaagtgtttcagccagtgaggggcagtggccaatgatggttaactcctgttattttattgttggaggtgatggtagtgtgtgtgtgtgtgtgtgtgtgtgtgtgtgtgtgtgtgtgtgtgtgtgtagtctctggcatttatctatttgtgttgtagtgtgtctatgagcctgctcatagcaaggctaggaaacttcagattccataaagtaatagaaaggttctgttgaattttgttctgtcatcacatggtagacaacgaattcaagaacctatttttagagtatgaagtgagcaacctattgacagatggaagtggatacctctgttaccaaatagcaggacccatcctggtaagaaaatggagttaaggattctgaaaaggcaagaaaactagcttgtatatggaggaattgtatcatggtctagacagagtggcaggtaggcctatgcctagagtgggaggcagacaattacaggagaggtagggggtctgttcgagcagtgagaacttcattgagcaagcaagagatcatgggttttatccggtctgcagtgtggattcacagactgtttttaatcagagaactaagatgagcaaggttttgtataatgtaattaaaaagaggtcataggcaaatcactttggagattgtttaggcaaagggcccatgggagcaaatcatgattcgtgtaattggtcagatatgaggtgaaatgacctggaccaggaaagccaggggttgtctggggagacactgttggaggactatctgggtcacagaatcatcaggatgaaactgggaggggacagaagaaggagatggagaagtcagcaatgatgcagtgcctgccacacagtaggcactggataaatacctatgcaaatttaggtcactcttgtgatggttgatttttctgtgactagtactgaatgctactaaacggagaattctagtcatagtttaatcgctatgtgatcttgggaaagccacagtgttttttctataaaataggaattaaaccagataaatcctaacttttttttttctgtttgatgtttttggaacactactgtagagcaacacaggaaacaggacataaaaggtatgaccacgtttccacaaaaagacatatttcaaacttcaaatgagcagcttaattgaatatttagaagaaaattctaatttgaagactgccattatgctctcgtgcaatttcctaccccttcccacaagatataatttcattatgagtataagacttaagtgtccaaaaattttataagactatggtatatgtttcagattacctgtaatagttggtacaatgctagatacacctttaccattaacacttttacttggactgtgttacatctctttgcagggccttaatttggataccaaatacttgaagcatgacttcattcactcactcattcattcttccatctagctaacagacatttacagagtacaccgtcagatgcaaaaggagtaagacatcaacagtttacacagagagtaaacagcgcaccagagcagataagtatgcaggatgccataatgtatgctgggaagtgaataaagctatgaaagagatatagataaagtgatgtggctgtcaaaagaagagagtaattactttcagtgaaaagacagtagtaaaggcagatgtctttgggagataatatacaagcttatgcccacacagaaaattatgtagctgttagccctgcttgcaagttctcaactagaagatctagagatggctggcttgacactggtatatgtgctaacctaggagacagagttctggtggagtgtagcctgccagatcagtctgcggtcagattccactgcctttggcttcacgggggaaactgtgtgcacaagtccatagatttgaaattagaattcccagggtcctcttagcataggtctcttaatgtagtgacttttgctaataggtgtgactaatcttatcctccaggtgcctctgcagggtcaattcaagtgcctgtttagctttttgaaaatcaatagacatgatgattgtcgttaatgttatagctaatagtctctgagtgcttgttccttgctgtgcaactgtctaaatgcttggatgtattcatccacagtaaccctatgtagtaggttgtcctgaataccctttttctaataggcaacaccagagtaccaataatcatccaaggttatgcagctgggaagcagtgggacgtctactaaatccaggtactttggcctctgatcattatgtcctcttctaccatagcagcattttataaactggaacacagtgctttatgtaaacaataatatttctctaataaagccctctagtgatccagacccaagtccccagaggccagaggcagcaacagtgaaaaggaaaggtatacatcaaataagtccttaaaatctgtatctgttttttttttttcctcagcgcataaaactacaaatgacaccatgtgcatacactttaagcccttatgaaaaactttgattttccagtttagccttttcactgtgctgttaaagatatgccctggaagtttaggtgacccaagtgaggtcacagtatgggcacagtagagaagtgaaaactgtttagtgattatacgacttagattattggctaaaattagaaaaattattggctaaaattattggctaaaaagcaccaacactgggggagttttgttgattgagttgagctcctgtcagggtctatctcctaataacttcacagtttctctaagtcagggtgaggcatgcatctcttgacgtgtgctacttcttgtagaaggtaacaaggagaatctcattgctctagcagcagtatctcacttgtcctggggtgcagaatatctaagaacaccctattaccttctcaacatctagtggtcacttctttcgagtgaaggatgcatttcactgtgtatgagtttgttttcctttgttcccttaatggatttatttttttttaacacttgagcatgtcaaaacagcccttcaaatgctcttcctttggggtttagaaagatctcaactaatggtgacatcctaaggctcttacattgctttttgtaagtggatgaaaccaatctgataaaattttaaactgttttcctggatgagagtggctttctgtgtgattcagataggatgtgtgcttccacaggaatttagggtactggcatagagccccggaaaaggtagagtcctggagaagagattctaaaataggctgatgctaaatgcaaaataataacaaagcataaataacgctggtgattattgaaggctggatcagagccagaaatgctttagattttgaatgagggtttctcaaatgttctttgggaaaacaataaagatgagacatgctgcaattattttcacctaactttcgagtgtctgtaaacgtatcctggatacatgggctccaggcattgtgtaaattgtgttctagtttcccaaggctttttgactttaggagaaggaaaaactttatctttaggtaggctacacaaagcataggctataatctttcatacagaaaccacaattaacttgagaagtgaccttttagttaattaaataatcaatgcatgggctctttaaacaaatcttcattatgagttttcatgatcacaaatcacatagaagtatttatttggaagaagagtgagacttttgcttagacctgaggctgcctacctggaacatgccaaagaagggaggtgtggtgctcacctgtgagtgcctgggtaagagggctgcttcccaccaagagagaagaatcaaggtatgcagagacaatactgctcagtgacagggctcaggcccacagtgacagctcagtcaggacataaccttttggctactgttcttttgcccacaagcatagaatgttggcacaggaacaggtggtgtccatctgggctggtaaaactacctgatttccatacacacgtgatatcgcagctgcccagagcagcttctggacagaaggctctatggtcacttttgccactgaacacatttccacggctgttccataaggtgaggggagtctctcctctaaagagcatgctctgggactggctttctgtccctccgtttcttcagttctacccttctccccacagctgatgcagaggacgaagtcactttactgcaatggacaaggctctccggatgcaaatgttatctgggtggataattttaagtacaattttatttcagcttggcatttactgatacaaaaaacaaatttatgattatccccattctacttcctacttttcactttgatgctctgcccattcatctccaattccagagctgttttctttactgtcctgggtcattgaggaggcaatgccctttatgtctgccctcaggtctgtacttaattttgaagccaaagctagcaactgcttgattccaacctggtgagtttacactgtctacccccaggatttccctaatgagctggcgaatcgtctgagagagcattcaagaactagcaagcacaataggcacagagttactggacaattacagaattagtgagaatgctatccatgcaaaaggttcaaagcacagtgttagtggactcctaaatgagaaagctatccatgagaagggaggtggcttcggtgtaatgtgtcactggtcacttcctagctgcagtgttggttaaatatgaggagcattatcagacttatatgggcagcttattaaagacagaaagtgcaaaggtctggaatctataactaaatcatttaaaagtgtttactgaggaactcatgtccatggctacatgtggtggcttttgagtacttaatatgcacaagccagcattccaaacacagtctatggtctacctaatttaacttctctgatgcctatctgactaaggaatgaaaattatctccacctaaaagcagggaacttaaatatggaattgtgtggctggctaagagcataaagctgacatgtgtctaatctataatgtgagcctaaggagtctggcctgaaagtctttgtacctaatatcagttgtgaacttgtgtgttatgtgctgtcctttcaaaaaattaatgaataagacaaatggcatatctgttcttgtggggtttacagtctaataggagagataagcaaatgaataattgccatacattgatatgggctgtgataaactcgtggcttcttcctcttgcagagcataattggcctgtttactatctgcttcttttcccctttgctattctgcaaatgaatatcacattaatcttcctagggaggcagattttcacatgtgtaaagactacagtaagccaaacactcttcaactggagcatgttcaaccagaagaactaaaagcattaaggaaatttcctcaagtaaagaaaaacaaaaaacctcaaggcaaatacaccagccatttttacatagtgatcaaaaaggcaagtcactgatggttcaaagtcatcctcaacatgtgagtgtgcatccatcacccacctcatgccacctcttgtttgtgcttcatgctgagaatgctaagcagagatccaaaacttagcacaaaacatctgaaacaccaaactgaaaatttctcattattaaattgattttcagctactaggggagatcaataatctcatcgagagatgtaaacggggagatacagtgggcagggagaattcagcaaccatggagagatcaaggatacctaaaaacaacaaccaaccaacactagttttattccttaactggggatttggtcaaagtacaaatgttattcactctagcttgccacagttgcttctagctgttggcaaacacccgaactttaggaaccaatgctccctcacttgtaactacaaacacatcagcacataagtcaaaaaaacacgaaggacacaagaaggtcaagtaaattctctgtgtggcatggaacagcaaaacattaccatcttcattcagtttgtcatctgttgccacagggatttcagtaggggaagtagtgctgaaattctgatgtgaaatacaaaaaggacaaaaccaaaaacaggtggggaagttgtgtattatttggaatatttcagatgtaaatggcaagcgtgcaactgggactaccagacaacagaaaaatgacaagactgaaagaatgtcattgttcatgtaacccagtgattcacagtaggtgaggttgggcaccatggccccaacaacatcataagatgtctcctttaatgtcttggctctttttttttccccaattattattattattattattattattattattattattattattaattcaagttagggaacaggcttgtttcacatgtaagtcccctctccctctccctcccctcacctcgatccctcctcccccacctccaacctacccctcaccccatccacccatcactccccaggcagggtagggccctcaacagggcccccacaaagtccaccaaatcttccttgctgggcctaggcccctccctatgtgtccagagacagagcgcatcccttcacttgggatgggctctcgaagtccccctgcccaccagggaaaaatgccagtccacctccggaggctcccgggagtgcagaggcctccccattggcatccatgatcagggggctggatcagtcccgcactggcctccccaacaacctctggggttgatatgctttccctttttcaggccaactgtttctgtgggtttctccaagctggtacagaccccttcgatcttcattcctccctctcttcaactaggttccatatttcagctcagtgtatttctgtggacgtctgtctgcttccatcagccactggatgagggctctagagtagcatagagagtagtcatcaatctcattctaggggaagggcttctaggccatcctctcctccactgcccggactgtcagatcgtgtcatccttgtaggtctctggagatctccctagttccagatctcttctcggacctatagtggctccctctgaaatggtatctctcatcctgctctctctccactattctttcccctactcaatatctctgctcctccatttcctctcctctcctcttcttcttgtgctcttattgtggcagcaccctttcccctacccttatgctctcaattagctcgggagttcatgccacttcccattcctggggtccatttattccttagagtccttcatgatttctagtttctttggtgaagaggattataggctggtaaacctttgctctatgtctaacaatcatatatgagtgagtacataccatgtttgtgtttttgtgactgggttacctcactcaggatggtttcttctagctccatccatttgcctgcgaatttcaagattccattgcatttttctgctgagtagtactccattgtataaatgtacattttctctttccattcttcagttgaggggcatctaggttgcttctaggttctggctattacaaacaatgctgctatgaacatggttgaacatatgtcctggttgtatgaacatgcactatttgggtatataccaaagagaggaatggctggatcttgaggtagattgatacccatttttctgagcagccaccatactgatttccagaatggtcttacaagttcacactcccaccagcaatggaggagtgttccttgttctccgcatcctctccagcataggttgtcattggtatttttgattttagccattctgacaggtgtgaggtggtatcacagagttgttttgaattgcatttctctgatggccaaggattttgagcactttctttactgtctttcagccatttcagattcctctgttgaaaaatctctgtttagttctgcacgccactttttaatttctttgtttggtgttttggtggctagctttttgagctccttgtatattttggaaatcagtcctctgtcagatgtggggtgggtgaagatcttttcccattctgtgggtggtcgttttgtcttactgactgtgtcctttgccttacagaagctcctcagtttcaggaggtcccatttattgattgcacacctcagtgtctgtgcttcttgcgtgatgttcaggaattggtctcctgtgccaatttgttcaagggttattcccactttctcttctagaagattcagtgtggctggatttatggagagatctttgatccatttgcacttaagtttcgtgcatggtgacaggtatggatcaatctgcaatcttctgcatgtccgaatccaattgtgccagcaccatttgttgaagatgctatcttttttccattgtatagatttagcacctttgtcaaaaataaggtattcataggtgtgtgggttaatatctgggtcttcaattcgattccattggtctatctgtctgttcttgtgccaataccaagctgttttcagaactatggctctatagtagagcttgaattcagggatggttatgcctccagaagatcttttattgtaaagagttgttttggctatcctgggttttttatttttccatataaagttgagtattgttctttcaatgtctgtgaaaaactgtgttgggattttgatggggattgcgttgaatctgtagattgcttttggtaggattgcatttttactatgttaattctacctatccaagagcatgggagatctttccattttctggtatcttctttaatttctttctttaaagtctcaaagttcttattgtacaggtctttcacttttttggttagtgttacccccagatattttatgttacttgtggatattgtgaaagatgatgtttccatgatttctttctcattgagtttatcatctgtatacagtagggctacagatttttttgagttaactttgtatcctgctatcttgctgaaggtgtttatcagctgtaggagtttcctggtagagtttttcgggtcacttttgtagactatcatgtcatctgcaaatagtgaaagtttgacttcgtcctttccaatttgtatccctttgatcccctgttcttgtcttattgctctagctagaacttcaagtacaatattgaagaggtatgaagagagtggacatccttgtcttgttcctgattttagaggaaacgcttcgagtttctctccatttagtttgatgttggctgttggtttggtgtatattgtgtttatcatgtttagatatgttcctgttattcctgttctttccaagatctttatcatgaagggatgttggattttgtcaaaggctttttcagcatctagtgagatgatcatgtggtttttctttttcagtttgtttatatggtggattacattgatggtttttcgtatgttgaaccatccttgcatcccttggatgaagcctacttgatcgtggtggatgatttttctgatatgttcttggattcgattagccaatattttattgagtattttagcatcgatgttcatgagggatattggtctgtatttctctttcttagtcttatctttgtgtggcttgggtatcaaagtgatacatagaaagagtttggcaatatcccatctgcttctattgtgcggaacagtttgaggagtactcgtatcagctcttgtttgaatttctggtagaattctgcagtgaagtcatctggccctggactttttttggttgggaggcttttgatgactgcttctatttcattaggggttatgggtcgatttaaactgtttatctgatgttggtttaattttggtaagtgatattacccaggaaactgtccatttccattagattttcaaattttgtggagtacaggttttcaaagtatgacctgaagattctctagatttccacagtgtcctttgttatattccccttttcgtttctgattttgttaattagcatactctctctctgccttttggttagtttggctagaggtttgtctatcttgttgatcttctcaaagaaccaactctttgtttcattgattgtagtgttttcctagtttctactttattgatttcagctctcaggttgattatttcctggcgtctactccttcttggtgagtttgcttctttttgctctaatgctttcagttgttctgtcaattctctaatgtgactttactccagtttcttcatgtgggcacttagtgctatgaactttcctcttagcactgctttcagagtgtcccatatgtttgggtatgttgtgtctgcattatcattagattctaggaagtctttaatttgtttttttttcttttttatttcttcctcaacccaggaatggtgcaattgggtgttattcattttccaagagtttgcaggttttctgccatttgtattgttgctgaattctagctttaatgcatggtggtctgataagatacagggggttatttcaattcttttgtaactgtggaggtttgctttgttgcctactatgtggtcaattttagagaaggtgccatgtggtgctgagaagaaggtatattcttttgactttggatggaatgctctatagataatctgttaaccccagttgggtcataacttctttcagatcctttgtttctttgttaagtttctgtctggtggtcctatctagtggtgtaagggggtgttgaagtctcctactctaagtgtgtgtggttttatgtgtggtttgagctttagtaatgtttctttcacaaatgtgggtgccttcgtgtttggagcatagatgttcaggattgagatttcatcttgatagacttttcctgtgatgagtatgaaatgcctttcttcatctcttttgattgattttagtttaaagtccaatttgttagatattaggattgctacacctgcttgtttcttgaggccatttgattggaaaatcttttcccatccttttactctgaggtatcgcctgtctttgaagttgaggtgtgtttcttgtaaacagcagaaggatggattctgtctttgtatccattctgttagcctatatctttttatgggtaagttaagaccattgacatttagggatattaatgtccatttttcatttgttcttgtttgttttggatttattgttggtggtgtcattgtgtgtggattttgccttcctgcttctttttgtgtttggcaaaattagattatctattgcctgcgtttttgtgcatgtagttatgttccttgggttggagttttccttccagaacctctgtagtgctggatttgtggatatgtattgtttaaatctgtttttgtcatggaatatcttgttttctccatctatagtgattgaaagttttgctgggtacagtagtctgggttgacatccatgctcccttagtgcttgtagggtatctatccaagaccttctggctttcagagtttccattgagaagtcgggtgtgattctaattggtttgcctttatatgttacttggcctttttcctttgctgctcttaatattttctctttattctgtagatttggagttttgattattatgtgtcggggggacttctttttgtggtccagtctgtttggcgtcctgtaagcttcttgtactttcataggcatatccttctgtaggttggggaagttttcttctatgattttgttgaatatgttttctgtacctttgagcagtgtttcttcaccttcttctacacctattattcttaggtttggtcttttcacagtgtcccatatttcctggatattttgtgttagggatttgttggacttgaggttttctttggttgatgaatgtatatcctctagtgagtcttcaatagctgagatcctctcttctgtctcttggattctattagttatactcacgtctttagttcctgatcatttatccagtctttccatttctagcatcgcctcattctgtgttttctttattgtgtctaattcagctttcatgctttgaactgtttcaagagtttccttcacttgtttggttgttttatcttgggtttctttaaattctttaagagatttgtttatttcttgaattttttggtttgtcttttcctccattttgtgtaattttttgcttgctttttcttctatttctttaagggattttcttgtttcctctttgaaggtctctatcatcttgctgagataatttttgaggtccatctcttcttcatgcactatgttggacttttcaggtcttgctggagtggagtccctagattctggtggtgtcttattggtctttctgttgttgagcgagttcttattctgtcttcttcccatatctttttctagtgagtgcaggtgggttctctctgtctcctcttgttacatagtagtgtgtgtgggccaggaattcaatgtccgaaggtctggatggtcttgcctctcctggtagtctcctcactcttaagaagttaggcctccatagggatcgggtgtgtgggggcgggacaggaagtaagagtggggtgtttctaggttctgggggctcctcactgcctgggcaggtctatcccaagcgggagcaggcccggggagatcggggtggatggggctttgaaagggagttgggtaagagtggtggatcactcacctcctggcagatcgggaaggaagagtggcctgtacccagattcagggagctcctccctgcccgggcgggtctatttcaagcaggcaagagcctggggagatctgggtgaatggcgctttggacaggagttgggtaaaagcagggggtcactcacctagttgctgatgggtaggcggaaagggaaggaggactggctgtaacaggattcagggagctcctccctgcctgggcatgtctctttcaagcagggacaagccgacaagggtcggcggaaaggactaatgtcttggctcttatacttctgtttgtggtctccctccttgagcctttggtgtttgtaggcctctattgtcttcagcattcacaaatttgaagcagacaaacttcagaaactatacagtccctgggaaattctatacttgttgtgccatgtgtccatttctgaactattcattattgctaggcaaaggaaactaaaaaatcaccatgtataatgtgctcagaatagtcctgggaccccacttctgtcagaatagaaggagtagagaatccaggttagccaatcataaaattcccttgcactgaacacagcccagaattaggtccttgcagttattttttttttttttacctttttctttattagaaagaaaataatttacatgtcaatcccaggttcctctccctcctctcctcccctgcccccccccaactaactccgtactcatcccataccctttctgctccccagggaccatgaggccttccatagggggtctccaaaatttgttatagtttttgggaagggcctaggccaacccctttgtgtctagactcagggagtttccctccatgtgggatgggctcctaaagtccattcctatgctagggataagtactgatccactagaagaggccccatagatttccaaggtctccttgctgacacccacattcagggggtatggatcagtcccatgctggttttccagctatcagtctgggaaccaagagttttcccttgttcagttcagctgtttctgtggatttcaccagcctggtatggatccctttgctcataagtcttccttctctgcatctggatttcagttcagttctaggtttagctgtgggtgtctgcttctacttccaccagctgctggatgaaggctatacgatggcatatgaattagtcatcaatctcattatcaggagagggcatttaaggtagcctttcctctgttgcttagtttgttagttggtgtcatctttgtagctctccagacatttccttagtgcctgatttctctttaaactcataacgtctccctttattatattatctcttatcctgctttcttctgttcttcccccaactcaatctctctgtcccatcatgtcttcctcacctctcctcttctcccattctcatatcctagttccctctcccctaaccccatgctcccaattttctcaggagatcttgtccctttccccttctccaggggatcatgtatgtctctcttagggtcctccttgtttaccatctctagaagtctgggctggaggctggcaatcctttactctatgtccaaagtccacatatgagtgagtaatacaatgcctgtctttatgtgactggtttacctcactcaggatggtttcttctagttccatccatttgccttcgaatttcaagattccattgccttttttttctgctgactagtactccattgtataaatgtaccacatttttttctatccattcttcagttgaggggcatctaggctgcttccagtttctggctattacaaacaatgctactatgaacatagctaaacagacatccttgttgtaggaatgtgcttcttttgggtatatgtctaagagtggaattgctggatctcgtggtagactgattcccaatttcctgaggaatcgccatacagatttccaaagtggctgtacgagttggcactcccaccagaagtggaggagtgttcccctttctccacaacctctccagcataaactgtcattggtgtttttgattttagccattctgacaggtgtaaaatggtatctcagagttgttttgatttgcatttccctgatggctaaggatgttgaacactttcttaagtgtcttcagccattttagattcctctattgagaattgtctatttagttctgtatcccactttttaattggattatttggtgttttggagactagcttcttgagttctttgtaaattttggagatcagccctctgtcagatgtggggttggtgaagatcttttcccaatctgtgggctgtcgttttgttttgttgactgtgtccttttacttacagaagcttctcagttttaggaggtcccatttattgtggatttcagtgtctgtgctactggtgttagtaggttcaggaagtggtctcctgtacaaattcattcaagacttttgttgtctttaaaaaagacttccataataactgcaaggcccataccaagctgatgaacaccttcagcaaagtggcaggatacaagattaactaaaaaaaaatcagtagccatactatatatggatgataaatgtgctgagaaagaaatcagagaaacatcaccctttacaattgccacaaacaacataaaatagcttagggtaatgctaacaaaaaagtgaaaacctatatcataagaattttgagtctttaaagaaagaaattaaagaagataccagaaaatggaaggatatcccatcttcttggataggtaggatcaacataataaaaacggcaatcttgccaaaagcaatctacagattcaatgcaatccccatcaaagtcccagaacaattcttcacagaacttgaaaaaaacaattctcaactttatatggaaaaacaaaagacccaggatagccaaaacaaccctgtacaattaaaaaaaaaaaaaaaaaaaaacttccagaggcatcaccatcctagatttcaagctctattatagagctatagtcctgaaaacatcttggtatgggacttgtcattattatggaagtcttttttaaagacaacaaaagccacccaaagtggaagtgaatgaagagcaaagtgtcacccacttacgtccatgatgaagatctcaataaacgttagagagcccaccagaggtaaaatgaaaaaaggctctatgataggtaaccttgactgtcagttgactggattaagaaacagttttcagagtagtaaatcactcttctaggacagggtggacacattctagagataattatacacagacggcgctgacataatggatgctttggtccactgctaggttcagaatatgatgatgttagtacggggtgataaaaatacaataagcggtgggactgtaaaggaagtcagtaactggacacgtgtccttgaagtctatgtattatcctgaactcttagcatatatgctttactatgcttcttgtcctctagggtttgaattccttgggtcctcctcatcctccccactatgactcactcaatcctctgaaaccttgagcaaattaatctttccctaatttaagtttgtttgtttgttttgtcagatattcattcataatgaccagagaagaaattaatatacctggtcaacactgacacatatgctaataagcttagcttctcatgccattatcatgcaaatactgaaaaataactgctagaatcaggcacatgttttaaattgtgcaaagtaatatcactataggccccacactttagaaggagctgcacaacataaatagctaaacctgaatttgttaaagcacataaaatatgcctctgcccttgggatccagtagctagtggtgctggcccaaggaagcaaaaccttaacatctgttctaataacacctttcactcctccagagaaaagcttctttatatctcctgtccttgttctcaaaataaaaggcaattgtgtacaaatataatcgaatcggtgggttatggtgctgtgagatggatattccccagcatgaggagaagtttgaatggcataagctctgaacagcaaaaaacaaattaattaacttgtcaaatttgtcttcacagataatgtgactgcactgaatccttgtatagaagattatcatttcccagtagtgtcaactgtccatttccttgcctctccttgcattccaattagtgatcccacagagacttattgacttgtacaggttgcacagggcagatgagaatgttttgcaatcttaaataattcatattaatattaaatataagtatttgtagccgctgtaataggcataacatttttaaagggtgacattgtttctttataaacacatgcacattgagtattctaatgagaaatttaatactttttattggattcagaaatcatttatcattacatatgtatgcatgttttgcttgcatgcacttctaagaacgacttgcatgcgcatctgtgcactataacagaacctggtacctcaggaggccagaagggggctacattcccctggacctggagttacagacagttgtgactcaccatctgagggctggggaccaaatctgggtcccccagaaaaacaacaagtgctcttgctgctgaaccattgtctcagtctcccaataaagtttttttaaacacccatttaatttatattttgtatgtatgtaaacatgtttgtacatagcaagtttgtggaggtcagagttttcaggagtcagttgttcccttttgtgtgagttctggggatgaactcaggttatcaggcttggtgctaagtgccttgatctgcagagtcatctcattggtataagaatttaaactttagagaacagttgcaatgatattagtaagattttagaatactaaaaataaaattttagttaaacataattttgaattaaatgtttgacctttattaaaggtggcctttatttgtccagtagtcggaatataaaaagttaagtaatctgggcagtggtggctaacacctttaatcccagcactccagaggcagaggcaggggatctctgtgaggtcaaggccagcctggtctacagagctacacagagaaaccctgtctcaaaaaaacaaaccaccaccaccaccaacaacaacaacaaaagttaagtattttagagtaaaagtggcctttttaaatacataaaattctgttgaccaaatattttatatttcctttaattttcattttagtgaaaatacattcataattttgtatactttaaaataaaatgttttctttaaatcccttaagcaatgaggatgaattctagattgtgattagtaaagttaagaaatttgaaagattgctcaatcctaagagtgctggttgctctttcagaggacctggatttgatacacagctgtctgtaattccagttccaggggatctactgccctcttcttgtctccatgggcactgtaaacacatagtgcacagaaatatatgcaaataaagtacatgtacaataaaaacaaaatgtaaaaaaagttttagttaaaaaagaaatttgagctcactttaaaaatctaaaaatattttatttgaaattgtaaacaatagaaatcaatgtgcttctgatcgcagagcctatgcaaaattgtgatgaaggaattacaaattttaattgcataaagatttggttgtttgtgaaaaatacatataaacaagaaaattaatcttactaaatctgtaacttcatcagattaaagtagatctctgcaactccctgccctctactaaaataagaatttaattgctaatcaaaacagtgaaaatgaaaaggggaattatttaactcaaattttcaatttgaaaacaccaaattaaatttgttcctgcttcaaaaagtcatattagtgaagtcagaaaattttatgtctaatgaaaactaattcttttaagtgttattgaataattaattacattaaacttagctacagtatcctttctgaccttttataaatattctgagcaaaataggttttctattcaaacaatgtaccaatgaagtaattttagtcacaaattcagcagattcacaatataatatgaagttgtcactagaatatatgtctccagttgtaccagtgcctatgatagtctatggaacagttcaaagttttgtgcaatattttctgtgatctaccaaacacagaatattttgatgaattacataataaattttgacataaagtcattactagaaacacgatgggaatggtaaccagatcttacaccaaacaacaaaacagcaactaccatcagcagcagcaacaatagcaaaaacaacttagttaagttaaagaaaaataagattggaggttgagtggggggaagaacagaagagagcaagataagagataatataatagagggagatattataggtttaaagagaaatcaggcactagggaaatgtctggagagctacaaagatgacaccaactaacaatctaagcaacagaggagaggctaccttaaatgccctcccctgataatgagattgataactgacctatgtgccatccaataaccttcatccagcagctggtggaagtagaatcagacacctacagctaaaccttgaactgaactgaaatccagttgcagagaaggaggactgatgagcaaagaggtccataccaggctggtgaaacccacagaaacagctgacctgaacaagggggaggtcttggtccccagactgatagctgggaaaccagcatgggactgatccagaccccttgaatgtgggtgtcagtgaggaaaccttggaaatctatggagctccttgtagtggaacagtttttattccttcctagcataagaatggattttgggagctgatgtcacatggagggaaactccctgagcctagacacaagaaggtgggcctaggccctttcccaaaggatatgacaaactctgaagaccctggggagcagaaagggtatgggatgggtagggcatcagtttgggggggcaggggaggaggggagggagagagacctgggattgacatgtaaaataatattctttctaattaaaatgaaaaagacactttgatctaaaaaaaaccagtaaaataaggtctttaaataaatggtgagccatgatagttagaaaatagactgaagtattagtctagtttctgaacaatgtcagctaacatcaaacaatgttctttaacaggttaaaaatattgtttagtatttcagaaaaaatgttcctgttgaataaaaagaaattgcatatgaaacttgccacaaagtgatattccattaacataaaagcaatttcagaaagaaaggcattcaaagagcattgccacaactctgatggaaaggactcaaataaaaatcccagcataacattgtgtaaagaccatttggaattcctttagacttacgatactgtcgcagagaggaatatctggacattgcatttgtgtgggtttctttacaatgttacagcattaaacattttaaagagctttagtaacactaaatctagatgattacttctggagatatcaaagaattatgatataaatgatagtaatctatatgatgaaattaaaatattaacccaccgtgataaagataatatatggtattgacctcatgacaatgtttgtacatagcacccaaaattatggtttatttccaacattaaatattgcactaaatattttcttgtccgttctaattgctattgcccaagaaaagcaaattttctgcaaattgaaattaacaaaaactatacaaggactatagtaactcaatgaaaattgtcatttgtcattgctctccataagataaatactgtatgagaatattgattaaaagagcacaattattgattttcctagaataagggcaagaagcataaatttcttggaataaacatgtattttaagaaatacatatccattttatttttacccaaacatagctacccataaagaggatccatacataaacaacaataattatattcatccatggtatactgtaaacttgaaactgtattaaaaataacatatatgcataattttagcttgaattttatgaagatacacctggctaggtgaggctttgggatacatattgcttaccatttttttgtttgtttgttttttgttctgttttgttttttcgtgacgggggtttctctgtgtagctttggactcacagagatccgtctgcctctgcctccttagtgctgggattataggcctggccatttttcatttaattcataacatttacttatttctacaaatgtactccaagcatattcttccatattgcagatttgttagggacaatctcagttagcattactgagtgtttagttgggctaatcttcctttcaataagttacattccattctaaaagatacgggaaatccgaacctgctttacgatctctttgagttctcagaggtctgcgctcacgcttgtctctggttcctgagtcactcggtgtatagattcttcatgcgtggtgtaagtccctgtttatgagttcaagttgttgtacagcccacatttcttctgattaaaatttcttacaaacagtgtatgtgaggcttcactggaagttagaaaaggtggcttagaggagcagggggtagagaaatcctcacctccaaatgtatactacagctactgttaccacattcttaccgttggctcctttacttcccatatttctccctatgttttcctcatccatttctgtccactacaccttctcggcaaactcttaattcctttattcttcagcacaaaacaaagctgtctccagtctttactccaaaacagagatataagcccattttgactgaaccaaaaacccactaaggtgctttgaaatgagagcagctatattaatagcacaaaagaccagtagagtcctcagattatttttaataagattcatccctcttcactcctttgatagcagctaaagttattttaaatagcagcattcttttaccattataaacaatttcaaagtaccacaagaatagaggcctgtgacccatcaggacccaagtatatcaacatggctgatgctggtggctgtttcatcaattcagaataacacaaaaattaaaccaatatcataactttattttgaagaaaagttccttgcacaagagaatggacatgaataaaatggaagtattgtcatggatctaaaaatcagtttttataggcccagtcatgggaaataaccaacaggatgaagggtgtttacttagcattagggtgttcttgtctgtgagagcagtgctattccttgctccccctagggcactgttagagattggagtttgggctgtgcagaaataaattgcttcaatttattgccttgttcaaagatacagttgtcttgtggaacatcagatcttcccagaatatccatacggaccgtaggagaagtggatgctaactggggattttccctttattcagtttctcttctatcctcaacaagactttggcttgtgtgtagtacagtccttggcacaaagaactctctgcggatcccttattctgcagtcctctggttcttcccaccctgggagctactcaggtctctaagccaggcttcggaacaccacggctctagctttcctttaaggaagccctggctcactgctgctgcactttagttcccagacattcaccccgagcaactctgattaaatcaggaaaagggatgctgatccaagcatatcaacaaatgttactcactctttatccacagtactgggacttagcaattccactccctcaaggttttttcctcctttctgttttcttctttcttatcactccatcatctcttacttggattactggaacagctcaataactagtcacttcgtgtcgggggttaagcttctttttccaactgttaccagagtgatatttacaaaatgccaactgcatcgtgtcatttccatggctgaaagcttccagtgtctcttctcacaggcaactgggataaagttcacacttactgacatgactaatatgtcttaataaactgcaccctgcacgctgtgggccattggccttctatagttatactaatcctccccattgcctgtcatgcttgcacgacagtgtgctattttcttcttaggacactacacagactactttgtgtccaaaacattgcatatccttctgggattccattcttgttagccccttgtcttggatcagtgacccattgcaaccacacttctgataaatttccccctttcatatacttctctcggttggaatactataggagctttccttgccaccatagtctggactaaacatttctatgtgtttccataattaccccttaacgcctgcctctttttataaagtctgtgcagaggagctgtgccgttttatgtattttacctcaaatcattaataaattctagtcatacagggaatacccattgctcattttcagttattttttattggatgttggtatgtctacaggatatatacagtgtgatagatatatacaatgtggagcaaatgagctcattgagacatccatcccctcaaatatttttaattgtttcttctttcaacctgaaatattgtttaattaggtgactatagtatattactgcaatacatgacagcaatgactagagatgggaaagagaaattagtaatatttaagttgtcaggtaccacactgggtgtgaaatggtaaatgtcatttgaaggttgtcatatgctagtaaacacacatcttgcaaaaaaaaactccattggtaaccaataaaacatttataacagaagcataattggtcagtaaacagagaaggtaaaatagaatcaattaaactcagacaaggtggaaaaaagtgagattactttgtgatatggctatccctaaggagtttctgggtcaccagtattcaaggcttgacattcttgtttgtttttcagaccaggaggaatctagccagctgaatttgaagaagagttgaaacacagggctctactcactaggaaaagttaacttgtacaaaaatcatgcagatattaacactgtggccccgattttctcagaagtctctgcatggagcattttacaagatctgatgtcttgcacttattctgagaatagcatgtaaagtgtggtgatccaaggattgtctcagcttagcttgccgaatatgccttgtaaatgaaggtgaaactctcacagatcttgtatgtctgcaaccaaccctagctatcctcaagccaccaatggagttctaggccctttaatcagatccatttagttctttaaccttctaaaattcatgctagaatattctagcaaggaatgtctactcattttttaaaccgaccataacaagttaccacactttgatggcttgaaatgtattctttcgtggccctgtgggggagaagctgaaatctgtgtgcttctatggtcctactgccatagaaagtcctgggtgaggttcctatgtggaaatagcattagtctctatgcttagattcacaccctcttctttctgacagtgtctataccctcttttctgtagacccatgccattaggtttagtacccttcttcatatatatatcttctctatatctgagaagatcctaagtccaaagggcacactctgaagttctgggtagagggcactacctttgagcataatagctcaaagcacattccagtgtccataataattattctaagttgtggctctgacccactaagtgccctgatgttttgcttggtgaagaccactaagttttcccctatattccaaatgtcctaagatattatatatatatatatatatatatttaaggttgactaaataatgccaattttcattgcttttggttagaactactccaattatatttggcaacatttatttagaagttttccttaaaagatgagattgggagttatttaagaaacaatctagtcaggcagtggtggcacacacatttaatcccagcactaaggaggcagaagcaggtggatctctgagtttgagagcagcctggtctacagagctagttctaagacagccagggctgtcttaacactcttcttaacccagagtaaccctgtctcaaccactaaacaaataaaaatcccagaacaatccattttgaaaaaagatatcaaacttaaataacatgcaacttcaaaagaatataaaagggctcttctaatgattctaaaattaaggtccctatctgcaaggcctgtcatctgtgttttactaccctatgtaacacctgccttttatcaataaaaacaaacaagaaaattccaggaaaataaaaccagctcccttaaacaatgggagctgctttatgtcaactttgaagctgtgtgggaaatgcttgtttaatcagcaattcctacaaattttgctcttacaaatgtcaaaccaccagcattgtgctttctagcttacttcaactgcattttttatattctctgatgcttgctactccctccacttccaccagtaagaaggaactctgaaacaaaagatagggtaggttatgacattgttattaaagtttagttttaacggagattttctgggacatctctacataagccttaattaggataaaaacaagaaagatcctggagaataaaaaggagaggaccctggagaataaaaaataaaaaggaaaatcatattaagagtaataagcagcggtggagagatggcccaggttcaattcccagcacccactgggcagctcagaactgttggtaactccagttccagaggacctgataccctttcacatgggcaaaacaccaatgaacatgaaaataaaaaaataaatagataatttaaaaattataaagataatttttatgaaaaagaaaagataatttgtgatagtaatgggaacgagagcattaaatgcaggtagtaaggcatgggaatgattaaaagggcccactaatgactgagcgctaacagaccacctacctaaagcaaaataaaacaaagaaaaatagtattctgtccaaaaaaagaaactgaagggcccattcccaacaggctggtcatcactggcagacaatgttccaaatgtttgtgggtaaagaatttaaaatgcattgcttctcagagccactcagaattcactggtacctgagccaaagatgcccagatgttggcatggtacactttcattgccccctatcactctatgctatggattcctacctttctttcctgagaagattaatagaaacacgcaggttgcaaacttttataaaagcttttccttctgctaatggtcactaatgtatcctccagtactccagggaagattaatccaacatttgccaaacaggatcccggttgtccagtgtctgatgattcttgcacacattctcattctgttaggaccagcctgaacttttatacacatataattacttaaaactgacaaacctactcttctttgactgttggggtggcctagagctttcttctaagacttgcaaattcacaagatctttttacttttatgcctgcttttcattttaattttgttatttctccttggcctctgcttcctggatctattgtctttccttgatccttcatcagcgcagaagaggaacccagcccatttcccttggttgctacagggtagctggacagcttccattctttaaaatttttatttatttttattagtgagcattaattatacaaactaaagtgtataatcatagtaacactttcgtgtggatccttgtttcaatagcagaaagtgtaggaaagatggtgtaatcttacatggtagctccattctgcgaacttttcacatgtgaacatctgacatctcttgcccaaattcttaaatcactggcttcattacaagtacccattgtaccatattcctctgcaagttgttacatttgccttacttatactgatgtcatctctgttctctttctgtttcatgagggccatcataatctaagtctttttttcatgcatagtagtttatagtatcttgtcttacttaaccctctccaaggaatgacccagcttgcactcaagatcgtaacacaaaatagcttaaaatggcattttattatgggaaagacaattcctttaagagtgatgggactagtagtgaaagaaattgctctaaatggcattgttttcattccagtacattttatttgttatatgtcacatcatagaattctgagacaagggcatgaaatgagattccaaacccagcatctttctttttctcatcaactgaagtgggcagatcagaattggactttggttcttgtacaggcagctgacaaagagtggattggggttttgaacacaagaaaatgaacgtttagctggaataagaaaagatggtttctgacaaaaggtctgagcaaatgagacagaagcttaagtctcattagctgctcagcaaatcctctctgagtccaaccagaaccttaatgccataagctcttccctgttcatctgaggctcagccaggtactcagacttaattataatacaaagaagcatccttcacagctggcctacctcagaacactcagatgccctattatatcagcagagagctattttaattacagtttgatgatcattaattttaaaagcataaaaacaattgaaaaattgtactagttacagttcaactattagtacaaggttcgttcccatcttggcctttcttttttcttttcctctttttacctatttctttgtagtgctaatgtttgtttgaacctgatagttaaaaattatcattttatcataaataccaaaaaatactgacttatatttataaacactaggctctgggctgagaattttcatgcattatccatcttagcgtttatagtaactctttgatacatatgctatgcttatcatcctccagtttatagatgaaatccttgagggtcatctggtttttattttcccaacagcgtaacgttctcaaacaaagtgatctaagataacttaatccaatgctgaccattgatttatcatgtctgtcctcaagaatgttttcagttaacttacagtgcccaagatagtgttttccacttagaatgggaatagaaacttctcacttcccaattcagaattcctgccaaaggctcatagcttgagtctggtcatgagacatctgatgaatgcgagctgggaggcattctgcagaacagctggtcaattgatccttgtcaaaatatcaatgtggtgagataagaagaaaagactgaagaattgctggagatgaagaaaaaatacccaagagccgtagcaatggcatgcaatggaagagatggggttttgttttctatttcattcaataacaatggaataattggtgaagtgtaaaaacaaatctgcattatattagggctatttcaacaacactaatttcctcatttgtgttattacggcatgattatatgtatttctcaactctttcatccactattgtttctccaaggaggtaagttaaatcaatcaaatgatatttaggttaaattaatttcttcctatatgagaagttaagtactaaagtgggattttattgaatagcattgaactttagagggctacagtcattgtaataactgagaagttttcatttgtataaccaatttctgtccccttagggatgactcctattgaaattcataatataagagactatgcctgatttttaggaaatgcatactgaaatattcaggagtatagatctatcacatctttatcattctctagtagctcaaacatggatagaaatttggggagcacaggatagaggatgggagaataaaacaaagaaagaagcatataaaacaagcatggtcaaatgatagcctttagggattgtgtgtgaaaaatgacacacaaaaaacaaatacataaaacaaaagaaaagaataaaaagcataataatgaattgattttcaacaagggtcctgtcttaccacatgatgctgtctccatgccctgactcccagaggtcatctctgtgctcttggactccttaccttcagagtcataaactaaataaagttctattcttatgaattactcagttattaccaagtatatcaagacaaatgaactccaaatgcaccaaaggcccaaatgtaagagctaaactgcacaactattaaaattggacactggaaaacatttcagcactctatatttggcagtgattttcagaatatgcaccaaacgtgcagtcaataaaatagaaaatagatatatttggcttcatcagattaaaaactataaaacatcaatggataacactgagagattgaaaagacacccaatggcattgggaaatatatgtgtcataaacctcaacatttgacattgaattaaatatctaaaatacacaaaagcctcctacaactctctctctctttctccctccctccccctctctctctcacacacaaaggtaataaagaacttgaatatatttctctacagatgtcaaaaggaggcaacaacgtaaatgtctatcgccaagtgaaggaatggagaaaaatgtaggatatagacataatggaagagtactaatccttaaaaagaaatcttatacatatactaaactttcatcggaaaccagttcaaaaccatatgctaagtgaagtcaatcatgtaaaaaaaaccacaaataatttagggtgcacttatatgaaatccaaggataggaaatagagaccgaaaatagacaaagtaggcaagtggttgtcagcgaatggagacaagaacgagaaatggagagctagtatttagtagatagacagtttctgtttgatgatggaattgtcatggaaatggatacagtggttacacaacattgtgaatacacgtcacaccactgatgtaaacttaaactaaaatgttaaacttcacattagatatatttaccacagcaagaaaaattagggcatatggaaaggttttttggtactattcctgtaattttcttatatatttaaaatgacatcacaataaaaattgtgagaaatacaccagtgtcgaatgacatctctgggtaggtgataatgtctcctttgcagagtgcacgtggctcactggtactaatcccaaacttcccagctgaggattgtcgctatccacttgcccataaaagtccctgcttctgcctcaggtcatcttggccttttgcccaactatagatctcttttttacctggtcctcttgaacaacgaggagttttgtgggaccaagtgctacctccagctgatgcacagggactgagacaaaaatgtgccagagggacttgacaatggctttgcccagcatgtagactgagtcctccaatgttatgtggacatcaaagcgtttatggctctgttctggtgctctacaaaaggctttagctgactgaggttgttgtgtcagactatttctctacaatcacaacacataagcaatatccatagaggagagataaggtgaagaaattagcctgtcaacattatattagccatatgttaataagttcctactattttatattttggaatttacataggatttacagttgtgtgctctcctgttcacatatgagagatgaattaaaaatagtctaaggtaataccttatctcgcctacttgagtgtatcaactcaattccaagaatatataaaaatgttgttttattgagtttaatgaacaaagcatgcagaatcccatctgtcctattttttccctctcacacctggtgtctgtgccatttatcttctagttagaaaatactacctggatggacggatgtggctaattacaaatatacctggggcttattatttatgttaaacatggagttgatttctttgagattaggtcactcttttttaggtgggagggagtaagaagtgaaacatcagttgatgtcttattctttacttgtcacaacctccccaatacttggtcatcttttagtaagaaactaacttcagtagttttgtgtcactaaagctgtcatatcttgtgctcaacttcaataaacctattctttaggaaaggtgggggttataaacgacatatttatctgttttcttttgtttttgaggaataaataaaacctgctttgggccaagtgtgaccaccatacacatttacctataatttacaaaaccaaaatgttatctcctaaatgacgcatattcaaacattttattttgattggaaacaaaatctcactatgtagccaaaggtggcttcactcttgagccttctgactcagcctctgaagtgctgggattcaggtatgttgaatcatgcttggtttctccaagatgggataaccataataagattttctttgagagacatttctcctactcccttacctactttgtgtgtgtgtgtgtgtgtgtgtgtgtgtgtgtgtgtgtgtgtgtgtgtgtgtgtgatatgtgcatatatatgtgagctcctgtgaacaaacaggtctatatgagtacatatggaaaccaaataaatcttgggcataattgtacagggattgtccatattctatttgggagaggatttctcactaggactaggactcactagttcagctgggctggcttgaccagagatgctaataggttcacctgtatcctcctcgccagtgctgagagtgcaagcacatgcaaccttatctaactgtttgcatgagttctggggcctgatctcaggtccttatatttacacatcaagcacattactagatgtgcttgattcccccaagacttattgtataaatttaagttgtatgaaatatgctctctctctttacatataggtaaacagtctaacatggctattgcctttgatagttgtatcttttatatgatgggtggaaattgtaccttacatttcaatatgcaatatagtatcaattaatccccttttagtccatttagtcagtcgctgtattaataatgctccccttttatacatcaggtctctagtcttagtagccaacatggtgcaattttatacaccttgttcacaccctcttttccttttcctgttccccctttaactctctgatcctatatatttgatttaaaagaaaaattctatatatgagtttatacagcatttttatatgtaactattttatttaacaagggtcctacaggataatgagatggttcagcaaatatgggcacttgcctccaaactggagagtctgagttcaataccctggactcacttgatggaaggagagaacaaactctggcaaagtgtcctttgacttcacatacatgctgtgacattcaggtaagcacacacacacacacacacacacacacacacacacacacacacacacacacatacacacacacaagtttaaaaagccctacaagtgaatccatattattgcaaatgcaattagctttaatttaatgtggatcaaaagtatacatcacattaccttcatttctctgccaatagacagttttaatatgttgaatattgtgaataatgatatagaacacgagagtgcaaatatatctttgagatgttgatttcacttcccttgggtatataacccaagatacatgtggaccatatggtagttctaattttagttttttgaggaacccctgaatagtattgagtaatagtctcatttttagttttggatctgattgtccatgttgcaataactaaaatggcattgacaaggttgacattactgacaaggttgatcatatatatatggagagagagagagagagagagagagagagagagagagagagagagagagagagagagagagagagagtttctctgtgtagctttgtagaccaggctggccttgaactcacagagagttcacagagagtgcctgcctctgcctcctgagtgctgggattaaaggcatgctccaccaccaccaggcttatttttttttaattctagaagttttacattatcaatcctgacattgaaatgtttaataaatgtcaagttgatttttgtgtatgatatatgattatgtccaatttcattatttatatatttatacccaacatgattcataagatttttaaggctattctcaacattcaagatgtaccaaggcctttttctatcatcaatatgatttttcagaacgtttcaacaatttttctatgttgctaattgtttctgttcaggtttgtgatttagtttgaaatcacttttgaaggaaatgctattaatttgagaaatctaccttgagggaggaacacagaagtcatttctgaactgttgctacagttttaaatttcttttaaacaaaaaatcttattttaaattctaatattttataacacataaatgatctaaccttgtagttaatgacatgcaatatttataataagtctgtagctgggtttttcatttctatttgacaaacaaggaacctaaagctcatgggagcatgtgatacccggaaatcacaaggttagagactagaggaggctgtttgctgtgaagcatttctttcttccagcaaacaggcctcacaacacttccagatctctcaataaaaggcaatggctttcccacccaggagctaagccagcttcctttctctgtcctgaagggtctctgatgttcaaagccatttcctcagtttccacttcctctttccatctagactctaattcttcctccatgaccaccaatctagtttaagtttttcccttctttttttagtaagtgactactcacaactgttatgactggcattcctagcaaacacagagtgagaggattcttagggctacagtagtcctagccaagggtacattaaccatccctcttcactaagtggttacagctcacagaagccacgtgataactatatttaaaagataactataatagcaaaatgaacaatcattgagcttcaggctccgttatggtgtcgtgtcctgtcttttagcttttatttctgtgaagacagagtggcatgtcagacagagattaggcagtatgttttcatagaacttctgacatttaggaccagaatttctaggtcttgggacaacatgggaacatgaaagactgatgtcttgataaaaagctgacattgttcatagtttaactgtgtgcttgaaacggaagcaacaagaatcctcactgcttcttgactttgttaagaacttaagcatattctgagcaggactgtcactcagtagggatctgaagtacctgcccaacactcatgtacttgtgggtgtttatcattgctcaattagtggtgacttttaccattgcattctctttattcttagtaatacatctatttcacattaaatccacataaaataaatcattgcttaaattatgggttataaggaacactcatattgaactataataagttaatgaggaaataaaaatgtttccttagaaaattgacataaagattatctttaaaattaaatacaattacagaaagtttaaatttgcagaagataaagttactaaattatacactagatatcaagtatttaccatgacatatttttcttaattgatttgttatcaaactaagatttctccttggctttatgatcttgatggaaaacagactattggcatagtaggtttaggcaatggcttatttaataaaacaaaagatagtgccttccagagagtgaccggggaggggtgaatttgtccagaggagcagaatagcccattcggttctgtatagtggacttttaagaaggtactgtggatattaacaaggcagatggcacatttgtggggcaaaggggattctttttcccaaataatgatggatctgatcttcctatcagggtatctattcccaagaccttaaataaacatccacgggtaatgagtgtgggcattggaggggaggaaaggtgtttagaaaacacaataaaaattatattatgaagaggccagagtctttggaagatgcagccccttcactggaatgcatgccaaagatccctgatgctttattttgatacaactccaaagctatttagccacaggggtggaaaggagagggcttctgatgatcaagagatggctacacttatacactaaagtcttcttgattcctcctagcttcctgcctagccaagaagcacagctacctacagctgccacattccttggctgcctcatatccaattccatgcctgccattctcattcccctgcttcctttttatcagtgggaacaggtatggatgagtcacaaatcagtttcaattctttgcctttcattttcttcctcacggaaacccctaaaataaatagaggttgattatccctttgcatatgcatgcctttgtatacatatatatatatatagatacacactattatgttaaacttatacaaataatcaaattattcacacttactgtcagaaacagcaaaatctagtaagttccattaggcatctagagatgtctctagctcttaattaacattttggaaactataataaacatttaaaaactaaacataaggctttataaaagttgtatttttaaggtctagtatcagcaacaaaaaatcaaaactgtttttatgcatttgtgatataacaaaaatacattttgatcttcatttattgaatacacacaatgtcatctccaagttaaatgtgataagcaaaacatattttaaatctatccataaattacatccttttttcataactaatttaaagttcattcaataatatgaaacatttatttaatgtgaataactcaaatttatctttttaaatatgttttatggaatgctattacagaacaataaaactagcttgtaatttaacctttaattataatgtatctagatagagtaacataataacttatttattttgtactgtgcaaaaacatgctgtaaaattatttctaaaattgggtgttctttcaatttgccagtatggatgtagctttagaattaaaagagacagagaaagcaagattgattcaggttaatctgaaattgcacaaacaagaccaggatcatatgtgctgaaatccaagctactccatttctgactcatgggctattagtgtaccaacccgtttgttcactaatcactccactgagcacaaaagaattagggttcaaatcaccatcccacagccttgcggataaataaacacatgttgtttttaaaaccaagtttcaatgtggttcattgcactcataattaagtgaaaacagaccaccataatcatagtggcttttgttagcacaaagctgcaatacatacagtttcctttagttcttctcattcacagggaaatgccacaggcattcatttcacacaaaaaattttaagagttcttaaaagttcaatcacagtgataggatcaagagatcgaactagaggaaaaaaacataccagacccataggttcttggctttaaagacttaaactatgtgttaagcaacataggagcaaccaaataatataacgttcaatggttttattgtaaacaagtaaaacacatttcaatgaaatattcaatgtgtttataaatcacagatttctatcatagcatagctgaaccattccctgaatttaacattatttcatgccctcttaacaaggcgtagggggcaagattgtgatggggagacccatagagacagttgatctgagcttgtgggagctcacagactttggacagacaactagggacccagcgtgggactaacctaggctctctgcatctaggtgacagttgggtagcttcatcttttgtggagcccctagaggtggggtcaggacctgttcctcattctgagctagccagctctttggaaccttttccctatggtagggtgccttgttcagcgttgatgcaggggtgaggagcttgatcctgccttaacttgatgtgccaagcatagagggaaggaagcaggagaagaggagggagggggagactgtggttagtatgtaaaataaagcaaaaaaaaaaaagatttaaaaaaaagctcaggctacccaacttcatagatatctcacttgagctcctaagttactactatggtggcctgacgcgaaacacccagcatcacagtgctcctttaaagagaatgtggcaactgtaaataagagctgatttttcactctgttacaaaccacagagtcttcctgctacaactctgtgtaactctatcatctgaatcagtaaaggccccgctgcagtcagaccccagatcttaaactatatatagggatatttatagatataaatattataagatgaaaaaatatgtttatcttatagtccagacatcaagctgtcagtcagctttccatcagcaaaatccctgatctgttcaacttaaacagaggaaaggtgtgtttcatctcatggtttcacaggtttcagtctgtggtcagcaagccacattgctttgggacccatgatgaggcagcaaacttttgagggaagaactggggaagcaagctgataatctcatggaagctggaaagcaaagagagggaaagacactaccatcacagtctccttgccccagtcatctaaaccttcccagcagtccaaacatgcacctttgggagacactcaagatctgctgcagaacagactatcacaatttccttaacacaaaagatgaaacatatcccttcaggaggacatagtgtctcttacctaggaccagagggcccatgaccagaacagctcaaaagaaaatagatctattataatagaaagatccaatatagaaatcagagactccaaatataaacacataggttttattattttttaattttagtaatgtaataagatagaacaaaaacaaacagattggaattgaacaaataaacaaacagaaggaaaagagcccaagagaaggcccaagaatcagagacccactcattcacacacccaggaaccccatagcaacactacactggaagccaaaatatgtactcaaaggacctggtgcagacctgtgtaggtcctgggcatgttgacttagtctcttatgaattcatatgaactttgctcatgctggtttagagggcctggttttcttggtgtcctccatcctctctgtgtcttattctctttcctcctcatcttctgaagggttccctgagccctgatggaagggatttgaggaatccatctcatttcagggaagagtgttccaaagcctctcactctctgcatatctagctccgggtctctgtatttgttctcatctgctgcaggaggaagcttctctaatgatggctgagcaaggcattgatctataagtacagcaggattcatttattgctaccttttaagaagaccagtatctagtctcaagttcttggtcacccaagcagtgttgggtatgggttcccatctcctggagtcaaatcagtcaaatcagttattgtttgattactctctcacactttgtgccaccattgcactagcatgcattacagacaggacaccattgcagatcaaagattttgtggcttggttggtgtctgcttttctcctttggtagtgtgcaaactaatttcctataccaaagatgctagcatatagggatgaaggctctatgtaggccccagctcggcttctccatgttcaatgagttgtgcaggtgttgccttctgcaatggagtcttgctatcagtttctggagagcaacctatggtcttgcctacagcctaagtcatatgggaatttccatgggacccatttgtccaacagcttattaggtataacccaatcctagcactggaaacttcatttggtgacaagagatggccaattggaactttgtgtctcccattatttggctatttcatttagattgccttcatatatgcatatattttggagaagcttctaaggtactaagtttctatactactcctcaggtggaacttaattttagccttctcttttcatattctctccttcatccttctttcccctactcctttcaacttgatccccctgttccagcccccactccacagaatccacccataactatctattcttttccctttcctaatgggatatatctgttctccctaatttcttactgtatatctaacctctgtggtcctatggattgtagcgtggcaattatttacttaacaactaacatctacatataagtgaaaacatgctatatttgtcttttggggtctgccttacctcacacaggatgatatttttctagttccataaatttatcttcaaatgtttccaattatctgactgttatgaaaggagaaacaatgaagattatggagcgagtgtctttgtagtatgatgaagtatcccttgggtatatggccaagggtggtatagctggatattaaggtagatagattctcatcttcctgatgctacagacacactgatttccaaagtggttgtagaagttttcacccccaccaatagtagatgagtgtttcccatagttttcaccaacttggaatttcacttgttttactggtcttagtcattcctaaaggtgtagttttgatttgaatttccatgatggcaaaggatgttgaatatttctttgtttccaagtcttttgtgtttcatttttgagaattacctgtttagatctgtaacccattttttgttgggttacttggattttgatatcaagtttcttgagttcttatatattttgaatattaaccctctattggatttggagttggtaaaaactttcccattctgtagactgccactttgttcaaatgacagtgccttctgtagtgctgaatcttttcagtttcatgaggtcccatttattatttgttgatcttagtgcctgagctaacagtgttctgttcagaaaattttatactatgccaatgagttcaaagctactctgcactttctcttctatcaggttcaatgtatctggctttatgttgaggcctttgatccatttggagttgtgttttgttcatagtgatatgtatgtatatatttgcattcttcttcatatagtttccagtttaccagctgtctttttctagtatgtattgctagcttctttataaaatattggtgtgttgacttatgtctgggttttcaaatccattcccttgatcaatatgccagtttatgtgccaataccatgcttgttttttattactatagctcgatacaattttagattggagatgataatatctccagaagttcttttattattcaagagtgttttagctatcctgggtgttctgtgttttcatatgaagctgaaaattgtcctttcagattatgtgaaggattgtgttgggattttgatgggaattgcattgaatctgtagattgcttttgataggatggccattttttattttattaattttactgattcatgagcatgtgatgtctttccatcttctgatatcttcaactcttttttcaacaccttaaatattttatcatacaactctttcatttccttggttagagttttcccaagacgttttatattatttgaggctattaacacattggttttaaatccacataatgggtcagttaatattaacttttataactttgtctttctgttatttaaacaaaggtgttgtccctaggagtgcaatataagagccaaacagcaaatctctctccacagagacaattgttgctgtactcccactaccagaggagtctaagaagagcacgatgacaaagcttattgtgggtgccctgctcctctctgttcttttaggatgttcattccaagaaggtaggtactgatgccagctaaaaagttctccatgtctggaacagatagggtccaacaacttttgctgttgttgtttttaggaagatgtgagtgaaaggtgtgtggaagtcatttactctatctgttatactacctaatcttggcagttggaaactgtgaatgcttactatctcatgtcttttgtacaagagaaatgagagaatggttctagctattgtttccaagcacaggtctctatgggattgcagtatttcaaccaaggttgtagtgttatctgaaggcacactcagaaggtctgctcccaaacttctcttaaggctaatcaatttctgctcatttcaggaagttggctgggggcctgacttccttattgtctattgactgcagacctttcttaatatcctatcattgaggccctttctacaaaacagactacaacatgtgactgaaagaagtatccagttcagaagccacagacattctgtaatcaaatcttagaaatccttcaactgtgttctaccccttaccagtaaatcggtgcatacctaaaaagaagagaattaatttaggtcacatttttttaaaactaccacagaaattgatgactaaggatctatcttactataccaggatgtaaggagaatgaggaaagtagaatggggtttgcttccttgatgagagcacagtgacttctcatctaagagaacaagaaggaggacatgattttttttttctagaaacagacaagttggtaaagggaatgcttgtgctcatcatttttaagcccttagttgagatattataagagatagtggaagtagtttggacttttaaaagaaaaccatctctccccagtaattgaataattgagcaacccttgttaggtggcaggactgtgagcctcaattcttcaccaatacaatggtgacataataacaccaatcctgataaatagtgctgagataaattaggggaaggatgaattttgtaatgcatgttataaaactagctttttattaccaaagaagacactttactgttttgacagctttgtattttctttcctgtttctgccagtaagaaaacctgacactcatttccctatacctcagtgtgaatgtcagcagtgagttatacgttatttcaggctaaccgtgatattttgctccaagtttctacactgagaaggttacaaacagggagataattgatcatagaacataaatatatggtttacactccagtcctctggttgctgttgcattgacagaagtttagtttctctccctctctctctctctctctctctctctctctctctgtgtgtgtttgtgtgtgtgtatgtgtatgacacactctagctagtcctcttttctggaagcattccattcctactctctaggggtccagaatataagcatttcttaagaagcccttgtatgttaggaaatataattcgtgctgttttcccatttcctactatgaagcaaaactaactcagttcaagactttatattatttctaggtcatgtctcctctgattcagttagccattattctggagtttattttcccaactatttgttaaatttactttttctgaacaaggaaagaatcattccataatgattacagtttcatcttttcacaaggctcttaagacaaaataaatccatagtaaataatcctttaatactgttgctgctgtggtaaattggtccttactgagcatagagaagatgagggtacagtcctatcaaggtctggaccaagcaatttacatgatgctgttcctcagttatcatactgaccccaaatgttggctcatcacaagatccagaatgtatgtaaccccagctacagggattctctaggagaaatatcagtgatgggaagacacactgtgcctcctgctttattcattgcaatgattaagttacatttcattttctgtcactggtacttcttttatctcagtgctgtctcaaggaagatgcaggtagcgttgatataggaaatcttaaatctgtaactgatcacctgaatccaaattcatcttttattgtttggtttgagacagtctcaagtagcttgggtttggcctcaaactcactatatagagtagatggcctccacctctcaaccagtgagactgcagtcataggccacccctttcagggctgccattaacactgtatagctgcttagcattgttgagcttacacccttgcaggatctctgtgtgcaccaatgtgctatatatattcttccaggaaccaaaccacagatctaggaaaatgtttgtcttactgtcttttctttacagacatgacggggaaggcgtttgttttccctcaagaatcagccactgcctatgtgaccctgatcccaaagatgaggaagtcactgcagaatttcaccctgtgtctgaaggccttcactgacctcaccagaccttacagcctcttctcctacagcacaaagaccaagcacaatgagattcttctctttgtgacaaaattgggagagtatgacatcgctgttggaaattcagaagtcattttcaaagtgccccccaatccttatgccccacaacatgtctgtgtgagctgggagtctgcctctggaattgtagaactctggctggatggaaagcctatggggaggaaaggcttgaagaaggggtacagtgttggtgctgaggcaaagattatcataggacaagagcaggattcctttgggggagcttttgatgcaaaacaatcctttgttggagacatatgggaggtgtccttgtgggaccatgtggtccccctaaaagaaatggatggcgggtgttacaatggcaaccttataaattggcaagctctcaattttgaagacaatggctatgtggtcactaaacccaaactgtgggcttaaacttctttcttgtcagtcataatttgtgcttagtaataatcacgtactttctgaaattaaatctgttttttgtttctgttaaaatagtagaatggattgcattaaaaagcaaacaaatatgagtctttgctatatattatttactgttgcaaaagttggggcgaattgtaccacagttgtctgcagcatcaaaccataggagctagggggacacactgctctcagaattaggcacccatcttgtagaatcctgtttgaagtaagggatgtcctatggtagttctgtgtactcaagacctgtgaacacaatgtggctactgggatatgccttcaggaacagacctgcctgaaggaatcagatctccaaagagtttcaaaagggggcttctcatgagctaggttgagaaaatgaccattcacatatctagaaaaaattaaagatgtctgtaaaagtatctcccaaaagacaaaactcaactgtgctggaggtccctcttcacaggatctctcagctccctgggaagtagctattctagaacaagcacaaatgtcccttcttggccctcttactgttaaacccgtgaatcatgagagaaagaccagatccacattttttttgagggaaatgtgaagcaagctttaattaaacactagccaggatgattgacgggctttggccagggccattctggggttctcagagaatggcaatgagtaacattttgcagaggcctatgcagacaaacctacaaggccactatacttcccatcaggtccaatcttggacaagcatatatcccaacatacttcctgcccttgtacctcttgcctacatccattcaggggcaagcacacatcctgatgcatttcttgcctacatacttcctacccatatgtgatcaagcacttcctgtgtagttcatgtttcgatttaagaaaagcagcacgtgaaagaaaggtgccattggacagggttcaagcagaggttttcttttgcgggggggggggtatgggtaaagggatcataaaatgggaaatgggagggcagaaagagaccggcctccagagacaggagcagcaggagagagaagagagaaaagagggacacagagagagggatgggggagagtgggaggaagggagagaacagaaaggagagagggggagggagagagggggatgagaggtgggcagggcctttttaaaaggagacagtgaatgtgcacaggtggtgctcttagtggctgcagctgagggcataccctgtctgaaccccaaggacaggccagaacagatgcctgaatactaaccattgagtcaagccaaattgtttagggaaacaaaagcatgtggcttgttatctcccataaacaatagcctccagtattttaggaaataattgaccttctgcaagggacttacacattacaagtagttttgtctcatggatcacttagacatagtaaaactaaaacttaaaacctaactttggctctcatattaccactagagacacagaggccctggacttgaagtttgttttccatgcatttttaataggattcttgaaaaatgacgcagaatttttctttagttttgtatggatcacaaaatatttaacatatccagtgtccaccaggttaaatagttctaactcttaaatcttccttacacatgaaagtaaccttcccctttactgagcaacacagcagaggacagagggcttggggaaaccccaaattcttgtatagaaaagtctttaaaatggaagttctcaattttcctaatgctgtgaccttttaatacagtccctcatgttgtggtgacccacaactataaaattattttttgttgcttcttcataattctgatttgctactgttataaactgtaatgtaaatatcttatatggaagatatctgatatgcaacccctgtgaaagggtcctttgacctcacaggggtcacaacccacaggttgagaacccatggcttaacataaatactcaacaattcacagagaataagactatcagtgtagcaaagaagagggtaaagacaaagcttgactatcaggtcatattttccacagacaagaatgaaaatcatgggccaatttccattctggcatcatcgagacttagtgaaggtatggaattaatgtatttaattaaaaaaaatctttcttcagacatccctgtgttactccacagaaagtgtgatcaagttccgaattgaatatggataagttgcttagtaacgttgaacatactggtgatccagactcactgagcgactggttttaatgtgagtttcaaaaatttggagaaaaattgtacagatctccaaggccagtgagaatatttatctatgacggcatttctgtgggacagtcagagtctgtaacattcatcactgcccaaagaagagagtggtctaagtacaagagggagcactgacggcttctagcacacctggccatcagccatgtcttctctgaagctttaggactcaacatctgcctggtgtttatggcaagttttcaacacagtgttcatacaggcaccacacaacccacttttgtgccatgaactgataataatgaactccacccttgattatgattcctacccatttcccagtttgtgagctctatctggtcattactctggtggcagcctgggagaccataaaagctgtagcagaataatgataaaagcaagaaggtgggaatggagatgagtgatagagtatttgccccacatgtgcaagacacagggttcaatctctcacaccacaaaaagaatttaagttttaattaaaagaaaataaatataaaataaaaacaaggatcagcctttagtaattcaagtcattctttaatgtaacctcatcaccaaattttgcagtttcttctgagtataggtagaatgacaggaaacaattgtttttgagctttcaaaaatacccagaccttttacttgtatattttgattcctgttcttctggttttgtggaggctgtgtgtgtttgtgtttgtgtgtgtgtgtgtgtgtgtgcatgtttcttgttttttatttgttttatttttgtgtgtttgttggggggagagagaggtgttgggtgggtgaggaagcaaggatgagttgggaagagttgtgagaggggaaaaatgtgatcagattacgtattatgaaaaaatatttctcaatagaaaaaggaaacaaaaccctatactgtgactatacagtatatccatgagagatacgtttcaagacctcccatggatggctaaatttgaggcatataagcagtcaaccttatatatactgtttctcttacttatacatgtttacgataaagtttactttataaattaaaatgtacactaagagattagcacaatagctaatgatgtggacatgtctcagtggataaatcacttaccacaaaagtgtgaggactggagttctgatccccagaacctgtgtaaatgccaggtgggagagggcagcccacctgtaattttgtatttaggtggtggacatggggaattctcagagcaaatctggctaaagagactagctgtgtctataattgttgggcttggttgagaaaccccaccttaaagaataaggtagaagagtcatcaagggagattcccagtattgatattagaactccccaagtacatatacacatgtatgaacacaccccacatatgcccacatacattcaaacatgcatacacacacacgaatagtatacacatacatacacacataaaaagacaaaaattgtaatggcaacagaaaaactataccaatatattgcaatgaaaagttaagtgacagttgtctatgatttgttttcaagatactgatactacaccgtatcagtagatagcatatagaactgcacaaagagatgatccatgttccaagtagaatgggtcagagctgtgctagattcaattttgttagttaaaatggtagataatttaaactgaggaattgtttgtattaggagtattccatttatattttcagaccagaattcaccatgattaattgaaaatacagacagataaaaggaatccactgtatgccaaactgctgaatatcctagacaagagcttttttcccaatagcacgataaatggcatccttgacttctttgtttctcaacgtatataccacagggttaaggagaggagtaaacacagtataagttactgagatcagctggtcctgatccctggtgttctctgatttgggcttcaggtaggcaatagaggcacaaccatagtggatgatgaccacagtgaggtgggaggcacaggtggcaaaggctttcttccgtccctcagcagaggcaatcttgaggatggtggagatgatgagaatgtaagagacgaaaactaagcccatgggcaccacaataaccagtgagctgatgataaagttaattatgtcatgtagagtggtatcagcgcaggacagtttcataacaggacggatgtcacagaaatagtgagctacctctctatcacaaaaaggtgccctgaacacagatgctatttgaattatggccacaagcagcccaatgccgcaggatcccaatactagctgggcacataccttcttgttcatgatgactgtgtacctcaaggggttacagatggctacatagcggtcatatcccatcgctgtgagcagaaaacagttgttaatggccaaagtgataaaaaagaacatctgggtagcacagctagccaaagacatagactggcttgaacctacaaggctggagagcatccttggtacaatgaccaatgtgtagaccgtctctgaagtggaaagcatacaaagaaagaagtacatgggggtatgaagatggcgatcaatactgataattatcacgataatgacattgccagtcagggttagcaggtacaaggtcagaaatatcataaagagagtaaacttatattcctgaaagctggaaaaaccttggaaaacaaattcactcacttctgtgtggtttcttctcatcatcttcccgacacaatggcaggtttgagtcaatcagtcagactacattagtgccgaatgctttgagtaggtgacccttaggaagaaccgataatggctctgtgtccgggtagatatagagttagcaggggcagctgtccatctggtagtcaaagatagacacaagcaggagctaatttaatgtgtagaattttatgtgtgaagtgtggtatggattcctggtgaggtagacagtaggtattggaggagagtgggcaaaagaaacagaggagccatagttaaaattgaaaggcacttccccttagggcatagcttcagaacttgttacctaaaatttgtttaaaatagaattttattgtcttcttaaagggctgcccttcttctgtgttgctgaacaaaaggatgctggctgctccagctcttcacaaatgcttgccttctcccatacatttgtctacttcatgaacccacttccacagatcgtttagcctttgcaaacctgaccgtccccgatcacatttttaaaacaagaaatattcctctctttattcaatagtgaggaatgcttccttttcctcagaaagtcctctcagtacaggatgtaacctgtcaatcaagctccttgttgcccagcaactcattttcctggattgtgttcatctccaggccttttccagcttgtggttacatgtaaacagttggcctcactagactaagccattttttaaaatttcttcataattatacagttacatagctgtggggaaaccaatattttaacctctattttctcactgagaaaatagcatcaaaagtctttcatgttcaaaaatgattgagtagcattaacaacaatttgtatctctttaaggtttttccataagttattcaacatcataatgccctatatacttatttcttcctcccatcttgtagcaagaaaattatgacaccaaagtctatatgatttgctcaaattaattctatcttttacttccaaaactagggtaatttatcctctatcacaactgcctactaagcatcatgaccacaaggcagatgagaaataagaggactctctgtttttattggaaacaaataatgtattttcctctttctgtgggaatgaaattacattgtgaagaaatggaaaatccagaaaaataatttggaaaactagaaaagttttagaacctaaaaagctgaggaaatattaggagattaatgctaatcaatataaatgccttggattaatatttctactttcaattatgtattctaagaaaaatatcagatatctgtataaggatgtatgtaaaaagaacttgtattattttatctgtaatagggaaggccaaaaccaatgaaaattaataattaatttacaatcaaattaattatggcataggtatctgatgggaaccatgtggtcagctcatagctaaagagagctgacatggaaaatttgatggataggaagaacacagactgcaatttataaaacaaaaaggagtcaaaataaggaataaaatcatatacatacaaacaacactaagcaagctcagcaggttgtattcataaatttatgcacgtgtatgtaacaatacaaatctaagaaaaaaaggggccatgcatttgaaaaggagtaagtaagggaatgtggaggggtttgtaagaggaaaggtaaaatgatgtaattaaatttaaatattttaaaggaatgaaaagggagggaaacaataacatacatagcatttaaacaaagaaaatccactaaagtttctttttttgattaatgtttagacaatccaaaattacctttttaatatttcccatataacccagcctttttcatttaattatttctttaaacacctaaaaacaaaattgctaaatatttcttcccagtcaaaacttatcattggatggcagagaggaccaagaaacaaagatgaaaacagggagtgactctacctcggagaagcaaaggttgaaggcacagtgcttgagcaagtcagaggctttgagtgggaagccagagggggactatcttcagtgtttgaaatctgtaattagtaaaatgaaaacttttggaacggtgatggagcagactcaagcagtgatatgctcatcataggtgcaaatctaaagtgaataagagtcttaaaggccatattttaaaaatagaattaatgaaaacattcagaattgactaaatatccttgctgcttttatgacagcaggatgcaaggagctgactgggaatgagtttgaaatttcttaactgaatattttgaagaacagtacaaaaataatttgaaaatattagctatgagtaagaccaaatgaatacttcaattcctcacagatgaaggggtagaatgggctacctcttaattaactattcctgtataactgggattcatcatatgttttagatgaggaaaaagaaatgtttatgtaactgggggatcaaagtatgccagactctacaaagactgagtgaagcatatgaattctggaactttttttttcatgaggaaaataatgatggctcctcaggatggaagaagaaatgagtgaacacagggacagctggatcacatcagccaatgcaacaccccagcctccttccgtggagtcccaagcaccaaagaagcaacattttatttcaatttctattctgattggggaaagaaaaatttcatcccagctcctaattttttttttaaaattcttccatagtaataacttccttcctagacctgaaaaccaattctgagcaagcagctaatcccactcgtttcatttaccaagacttacctattggaagcaagagttaaaaaaacaaaaaagacaaacctcaagtacttggaagtcttgagtctatcaaatatgactgaatgattggaccctagagttaggaagtgattttcaaagcacaccattcctcacaaatagtcccccaaattttgcttcagtgcatccaatgattagaaacatattatcttataagtcagtagctctctttttttaaaaggaaaatactatgtgtatttagaaaaataaaattacactttcaaattacaagtactcagagtggtggggatgagcaaacagaaatcttagctttctcctccatatactctggcctataggtaaccatggttatcctctcctttccctttccctgttttgtttttttttttctgtctggaattttatttttatataaccttacatagttccatagcacttcagttttacacaatggaatcagactgtacataccaactcttgtctaccttcttccattgcaggttatgtcttgagcttttcctgtaactctgccgtccatctcattccttttgtttctagaggtgtatactattccaatgctggcatcagttccaaggtttttgtctttggtacgtggaaaacactactttctactctctcaatatctatttccttgctcattacacctcctacacccttctttctatgtcctctaacatgagactatttcacacactgctgatattttcaaggcacagcaagatttcacgtctttgagtctattaccacagcaaaggggcatggcatatagtaacattaatggacatgagggtctataaaggcaaccaaatactgaaaactgaaagggggaaatacacttgatattccattctcatttactcactgcttctgaccttggcaataggaatcagaaggaggcacgttctagagtaatcttcacaaagtactgaaaagactgagtctaaaaaacagacacgagtggacaaaacccacatccaaggggtatttacaatggaagctagaactgataaaatgaaaattcagctctctagtatgaaacgtaaacttaaattattgttgtccccagtggaaattgggtgagttgacttctttggtcttgaagtatatgagggggaaaaaagagaaatatgttctcttaatttgcaaatttcaggagctttgaatgtttattttctctaaaaactagtgaatctctttgccctgatctcctgagggtccttcctttggagaatcacttagaggtcctaagagacaaacgagagggaacctggcccctagtctcatgggcttcattaggaagttgggtggctgctggagaagacgttatcatgtgtttactgtttgagaattgtgcaggttccagaaacggagtctacattgacgtttacagaagtaaaccaattaatactgataaacttgcaaagagaagatgctaaattttaatttttctgtactagaaagcagcttatttcataaatcttattcaaataattaagatcacttgtagcagtggattactgcaggctaaggtaaggcttgtctagcccagcttcagcctacagttgaattccttaagtctcactgatacatgcctcatcttaacatccatttacaacagcaacaaaacaaagagtcacctacacttgcaaaaggtccctgaacttcctggaaataaaatgaattggctatgcattggtggttctccctccaaggatgatctgtgcctccacagtagcctgggaggaagcgtttcagctcttcccattgcagggaaacaccacagcaatcctgaattcagactaaggatgcttcaagcaacacagtctcttctttagtgactcacacagtgcacatttgtcacagaggagcaccaaaggaaaaagaaaatcacatgaaccattggagacccctagtttagaaatcaacatttctgagccaggcaaggtttcacacacacacacacacacacacacacacacacacacacacacacacacacacacacacgcacacacccctgaaacaagagctcaacgtcattatcccctgctttagggagttcaaggctagcctggctacatgcagcacacacacacacacacacacacacacacacctgaaacaagagctcaacgtcattatcccctgctttagggagttcaaggctagcctggctacatgaatgagactctgtcttaaaaaaaaaaaaaaaaaaaaacaaacaaacagagaaagtgagaaagagagagaaaaatcattttaattttaaaatgtataatatatgcattcatatgactgtatctattaaaacatttattcactggtatggaaaagtaggatgatgatcatgtttgttactgctaatatttgaatatgtctttcaaatatcatatgttaaaactttgatccctaaatttacttaggtggtatttagaggtgagagctttgtgaagcgactgtattagactaagctaccataagactgattcacttttttatgtgttatatttatttatttttatgttatgtgttttgttttatgtgatcagtgttttgcctctatgtatgtttgtgcatcgtgttcatgtagggctggaagaatacagaagtcctcttggaaatggagtaacagatgactgtgagctgccatgtgggtgatgggaatggaacccaagacttctgcaagatcagtcagagctcttgacaactgagccaactctccagccctgcaaaactttcctgcggggtgcattgcagagatcccgaatctgccacagactgtctgattttgcagcattcctttaaaatccaggtagaagctgtagctcttgcattctgcacgaatgcaaaaacatcaaatgcatgctgccaagctcatgtatctatgcactcctgggccataacagcaaagatttctgagttcctggatagttgagctcaagaaatatttttcaaggggcacttttgaactgtcttctcaaagccaaacaacaaaaccttcaaatgagctaaaacgttttttacccttcacactgtaatgaagtgagtagggccagttcctgagctgtggtcatgtcatttttcctattagcctgacacagaataattgcttattaaaaaacagatatcctttcagcagcaaccctttcattgatgccaactacgcatttgcttatattctggacaaatctttagcgttccaagatgttgtttgttttggtctgatttttgctcttggttttcactatacatctggcaaaaagcagccagcaatatccatgtcataccctgaaaaaccactctgtcctcaaattaatatcgaattaatcaattacttttaagctcagcatcatccaaagtgtcaggagctagataaaatatagaaaaacaatttatagaatatatcacattgagcatagtccttactgtccaaattttattagcataaggggttttttagattttttattttattaactaattatgtgtgtgcatatgcctgcagatgccagagtaccagacatacttataataaaaaaattccatattgtttaccagaccctcaactttaactagtcagcctaaattgtatctaggagcctttattaagtgacacatagagcatgtaacaattatagtcagagaataaaaggccatgaattcaagagggagctgggagtgtatgggaggaggggggtgacataagcatattttaattaaaatttgaaaaaaaagggtcacaggcacatagtgcttgtttgtttaattctaagcaatgctaattttgtttttttctgttttaactttctttttatttattctttgtgtctttcatttcatgcatcaccattccaactatctcccatgcctcctcccaaataaaacaaaataaaatgtaaaagaaaaattaaaaatggaaaggggaaaatctcgccctgaaaactgtagtgtgacacggtgagtcaggtattattaaaccactttatccatacatattttcatgcaggcattcattgcaaagaatcactggtctggtttgaggcccctggtctctgccacactatagccactgggcccttactgggactcttcctggacatcctgttgttgccttgagtcatgggtatcctgcagcctcaggtactcagtaccagcccactccccatgctccagtagatcacagttgtggtggatattgggatgagccaacaactaaccctggttcttggcctgggtagtttcagggttggtctgcacaccagctctccccgtcttcaccaccagggtagctctccagcattgattgccctggctaattcaccccttatggcaatgagcacttctcttgtttttttcccccactttcacggtctcaggatcagttctcccatacctacaccttcagggccagagctactgtgttgctcaggtgtggcatacgggtcactctcccaagtgctgcagctgatgaggggcagggacagctctcttgctcttatgacctcagggccagctcttctgcttgcctcaggtgttgatgggtggtgggggtggatgggagggcatttctctcctaaccatgccacatgaccaatgagtaatgggtacagctctcccatgctcacaaaacagggactggctcacctacatctccaccaatggggccagctctaccgtgctgcccaggagaggtacagggcctgctctccagagtgttgcagctggtggggggaggggcatctcttttgcttttatgacctcagggccagctctcccaccttcctcaggtggtgatgggggcgtctctcctccacccaagttgccatatgacagatgaggggtggggccaaggtcccccacactcacgtttttggggctagctcacctgtgccctagtcaacaggatcagctctgctgtgctgcccagagcaaagctaatttttatttctttttgagatctcatacaacatattttgataacattctttttccttccccaggtcctctcaggtcctccctccctccctacccaccctacttcatgtttttttctccttaacaacaacaaaatgctgtgcaaaatcttaagatcacattatataccgtaaatacaaaccgttgttgttaattttgaaaagttatatttaaattacctcttgatcagtgttttagtgggcaacagcttgatcttgcatttaaactgatgaataacctaataatttaatcttttgataactcaatttgactaaacaattgtgataaagcacaaaacgccacttctttaatcatgtcattcatttatctctagtcaatgacacttttgtatagaaatttcttgcatcagttaggtgggatgtaagctaggaatgagaaaaaacaccggattgaatcttcacacttgaattgtccaagtgctgtgttcccttacagccaatgaaggaagtaaaaaccattcccctttgattttttttttaatgatacatgcctacaaatagtcatgacccaaccaacttatgcaatatgattcgaatggatctgagatggtgggattatacctcgagatggggttgagtctgcaaacttcagcaaatgtatgtgatttgctaagcagagagaaagagggtggcgtgggggggggtaagagagctctaagtaaggcttgtattcagaagataaaagaaatcatgcagaattaaagaagctgttctgtcttctcatgtgggtcacaaattctgaacatcatttcaaaataacatttgtatccaagtataccaccatgaatgagccatatagaatcaaattgcttgtgatttttggacaatggggattttgttcataaataaatcataaaaggctggactgaggagacttcttcagccatatgactggaatagtaagttagccacagattggaacttggcaggatgaggaactacatcttctatttcatttatttgctttattatgctgtatttccagttaattaaatttatagtcacatatcccatggttagaatggtggaaagtggattatgaagtcattttacatattctgaaaaagactgacaggccatcagtcataaaggaaaacagcctatgatgctaattaccatggaaattaactatagaatatgtcctgggggctggttttcctaagcacagatgcacagacaagattggtagctcccacgaagggcgaagaattcgagatcaagagtggtccatcgctctctagcgctctttaatttgtatacatatttagaaatatttgcctttagggagagaagatgatttattagattgcagcatcttgatggaataatcaatgtgttaattgctcatttatctctctagtaagtatttattggaaatttaaacattctctgcgctagagtaagccccaggtaaagagaagttgatcaaatacatgtagacatccaattcaatgatattatgtgatgaggagccagttaagaaaataagctattttcttatactgtgatacatactattgttaggaaagactgaagccccatgagaacaataaatgacctctgccatacattttaatacactatacacacatacccatcaggaagtgaaagttacatggaaattattctcttgtatatatttgaagagttcttttcctggggagacataaatgtctgcttcatcctgacaggaatcattgacaggccaacgtatgatcccaccaaagtccagtttggaaaacctatgaggtttttttggtttgcttagaaagtgtgggttagatgcgacctataggaggacgagtgactccaaagtaactgtgccactgaaaatgttacctcagaaaggatgatgacttttcacagctacagatgaaatcctcacttcagttaaccttgcatattctatactctagagtcaatgaagcaatgttcagttagggcagaattatacacaggtagctttaaggtacaggagggagtgattgagctagcagatgaggacacaatgaccctctgtgcactccttcagtgaaagagtatcaatagtcaacaaatatatatatatatatatatatatatatatatatacatatatatatatatttgcatttaaatcatgatcttaatattctgagataactttagcttttttagagtcttggccatgggccacagccagctctagtgagattaccattgtaagttggggcttacatgatagaaacacaggcccttgaccatggagaccacacaaagatttttttaaaaaatacacaacagttttttatcaattcgttgagaatttcacagatgtatacaatatatttctatcttatttcccaccacactctccagctccccttgggtttctctaataagtctctctctaaagtttatgttgttaactttgtgattatttttatggtccattaagtgctgctcataagcacatgggtggtaggtcatccgcagggacatgagctacttaccagaaccatgtctctaaagttaaccagctgtccctctcctaggagctgtaaggagttccctagctagggatagggtctcatgtgacacttccacagttttgctggattattgacggagttgatctcatgcagatccttccacagacattcacagttaataggagttcatgagtgcatcatctatgccatgtccaggagacagctttgccccagtcctccctgaggtttggttcctacaatctttctgctctctttcctatgatgttctctaaggctttcatggagggaaaatgatgtagatgtcaccttaatggctgagcattccatcagaacttctctgaactttaaccagttctaaatctctgtattaactaccatctactacacaaagacacactaactttccaattcccatttattggactatcctttgtccttttcccacttgaaaactgacagactcagcacattttatcccttggcatattgaagctctttctagtgtgggttgtgtgacactacgaagtcctgttgctactaaagaggactttactgggtgtggtcattgagcatccaatggtttattggccttctattctcttaactatacagttcacacaaaccattctgtcgtgttcactcagtccaaattgaacccatctcaactggttgtctctaaattcttttttttttattttaatggctctgtttttgttgttactttaggactttggacaaaaactgactaggaaactggaaataactgcccttccttacaaatccttcatgtttgcatcaatcctgctttaactcctctctttcttcagcttctgctttcagatctgccactgcccccccccccactgcttttccttttcacctccaacagctttgagacagcacagaaggcaaggtttctaaatgtcctgaactgtcaccttgccagtcagagaggagaatgagggactcatccatcaggcagcaggagtccctgctcttgggcaccaccacaggcacatattgccctcataactagcttctgtcctcttgaacctgtactcctcactgctaggaaacacttggatgtcagacccacagaggacctcgaagcacatggagtccaacctttccatttcacaagggtcattattttggaaagagtctcaaccggtgagctatatacaataattcattaacttaagaagttagttctgtggtcctattctcatgaggcaacaggcttgctcaatgacatcttaggccaattccacagcattttaattgcttcttataagtaaaatagtccactggggttaataaacacaagtctgttaattttgaatttgaattttaaatattacccaaaactgtgtgcacagttcagtgtgggcctagccctatcccaaaggacatgatcgactctggtgaccccctatggaaagcctcatcctccctggggtgcagaaaggatatgtgataggtagggttttagtgtgtgtggggagtgatagggaaggaggggagcgggtgggaactgggattgacatgtaaaacaatcttgtttctaattcaaataaaaaagtaactggcagaaaaagaaaatacaaaaacttaagttttaccccaaattgtttatatagcccagtatcctaagtgcctctacctgcccccagagtggcataggttgatagtttcagtgtcatgatatgtgttgggaggtataactcatgcttcctttactttttttgttatagttttattatttcaaacaatttttaaatttaaatatattttgatcatgtttttttcctctcacaagtcctttcagatcatctccccctccttacccactcaactttaagttctttctcagaaaagcaaaaacctaatgccacacaaaaccgttcaaaaccaagaaaacaaaataaaacaacaccaaattaacacacacacacacacacacacacacacacacacacacacacacacacacacacacacaccaaactgtaaccaaataaacacacagacaccctgcggagttcatcgtatgtctgtcagctactcttgaacatgaagcctgctttggagtggttgatattgggtaatctctgctttggtttcactcctagaattatagacttcacccctccgaaggcccaccaagggtcatctcctcccttggtgctgatcaagaacacacctacaggatatttaagactggttgtcagacctgccacatgctctctctcctgccttcctgatagtgctctagtttgctttggtttgtttattaactctggtcttattaattcagtttgatttggctcattgcattggtggaggatacccaataactggggatccaatacttatcagttgatatgcccagtttcactccattggagaaaactgattttccctctcccagcaggttataaatgatagctaagttgttagcctttatcctaatgggtaggtttccattaattaattaattaattaattaattcattcattcattcatttttttagctagcccaacaaagttggataaaacaaaccaacagaagggaaagagccttagaaaatgcacaagaatcagagacctatttgttcccacactcaggaatcatataaaaacactaaacaggaagccataatataaagacagaggaccgtgtctggtacacacctgtgcaggcctggtgtgagctgcttcagtctctgagttcaaatgagcattgctcatgctgattgagagtgcctttttttcttggtgtcttccatcttctctgcctcttacactctttctgcatctgcctactcagggttccctgaactctgagggggaaggatttgatggagacatcccattttagggctgagtgttccaaggtctctcactctctctgtggtatctggctgtgagactctatatttgttcccatctgctgcagaagcttctctgatgatgactgagcaaggcactgatctataacagaatatcattatgggtcatttaccattacattctctctctctctctctctctctctctctctctctctctctctctcattcattctttctttctttcttaggccagtagtatttggtttcaccttaggttcctgggctatctagtctcagtttcttgatcatccaagcagtggcaggtatgggtcccatttcattgagtgggccttagttcaaatcagttattggttgcttattccataagctttgtgccacgattgccctagcatatcttgcaggtactataccattataaataaagggttttggaggagaggaaggagaatagagaataaggcaactatccacagtgaacattcagaagcttcttgctttgttataagtgctcttattgtatataaactttgtaagttaaggtgaaggagtagtggggtttcctttgtgttggttgtcactgtttgtctaatgttatttattgtgtttcctttcttgatcattattcaaatcctattttgtaggcattcctttttaggttcttcatctgcagcttgtcttatccatcttcatatcttaaatgatctactcatctgagactctatcctttcgttcatctctcactgtaggaagccactcattatagtaaaccttgtcaaccacacattgtctctcctgggttgattatctctgaggcttaaggtttcattatttcctattatatatactttgtctatgggagaactaagtaaatgccatgaaaaatggtgactgcataggccaactgcatgcatacttctgggggggtatctatctctgcttaccctatttcttataaattgtagaagcattgaatgatctggaaatataatgcttcataatcaaagcaagatctagacatgcgatcccaacttacttagatgaagaaaatggtttaataactccaacttttatagcagccatcttgaaacaatacaatatgtcaaatgcctttctttccaatttataagacctggctatccaaatctgtgaacttcaaatattgacctcaccagtcatatgatctagacttctgtggcttatgaaagccagatgtaccagtgatatgtacttataagattcctttgaatcttaagtgataaaaccatggcatctgatatacagtaaatattcagtaaatgctatgaattaattgtggctattccatatttattatttttactgaaatatgcttcaatttttccattgtcatttctgcctatagagcttacttttttaaacaaagcactacatttgttaggataaatctttctgccaaagccacccgagccccaccgccatgtgggcggcctccgccagccacctgagttctgcctgccacgtggatggacaaaataatacagagacatattaggtacaaagctacttggccaatgactaggattctcatctgttagctcagtcttaattatcataaatctatatattttataagatttatcttaaagaggatgcctttctttggtgccctctcttgccagtggctcacatcctgccactggaggatgcgaaggggaaaaaggacactttctgtttctccttgcttaaatatgagtctccttgctatgtcacttcctgcctggatcaccacttctctattacacttcccagaatcctctttgactcctagtcccatctaacttgctgtctcattggccaaacaagtactttatccaataatcaataagataaacatacacagaagtacttcccccatcatacatttaaaaagaaaaaccctttctgtgtatctttgtcctatacagtactcaatgtattgctgtgtacatatcagctgcttaataagtatttttaaaaagatgtagtattgctataacctaatgcatgtttacaaattcaagttagttcttattttattaacaagacaaagggtaaaaatataatgtgagaagctcacacacaatttttcatatcatgataatatgttatactactaaaggaagaatttctgaacacagaccttcattgtacagtgaaatatactaagtatagagtccctgttggtattattttctcagcatttaacttacacattcagttatttggttgaaatccaaatgttaatgctctggtgatgggttttgcacaacttaagactttttttaaaaaagaaagtgttcattttagtgtgtttttgcaagatgcaaagatttaaaatagtcctgtccagagtgttatggcagaaacaactatattttaatcaaacaatgaaaacaatttcccttatttgtggaaggatttaattcaaatgcttatccccacttctgcttattagacctgttcataagctaacaaatgccatcccaatctcccccaaatgagaactcaccttgaccctgaatcctccaacccctcgaacccactggcaggttttgctaatgttatctgcaagagttcattttcttcatccctgtctgttgtcttcaacccacttcagcttgacttccatacacaccactccacagagatcaccatcactaattcccagagacttacacattaccagacacagtgtcatttatcttcacattttacttcatccatcagcaagattaaaaaatgaaccatttctctagaagtgtgctctctccacagctccagtgaggaccctcttatcttatgagctgtttcctctagtatctttcctggacctgtctcttcctccacccttgagatgctggtattctttagggctacatcctgggatttgctttgttcttttctctctctctctcattctatattttagtcaacttcaccttattcagtcatcagatatatgtcagaaatttaaatatacatttctagttcaaacacatatttctttcaactttctaaactatctatttatcagtagcactgtataaaaagggaaatcacaacacaacattctttaaattggaacacttaattttcctccctaaaacttatagtatcctaaactgtagtccttccccagccttcaataaaagtgatgtcaccactcacagagttattatggtagaaaattaggaactgtcttttatgctttctttatcatccaatctgtcagtaaatcctcttaatgcccaccttggagccatgaacccttcactaccatctctctaggacaacttattatcatattttattatcaattaaatcatattttaacaatcttctaagatactagaacacatctgactgcagatatatctatgtacatatctacctcaatatttattcatataaatgtggcatatgtatatacacatacaacattcatatgtatttaaaagtcctccaaatgttttaatcaaggcaatatttatacatgcatgcacacacacacacacacacacacacacacacacacacacacaccaccacacctgctttaaacagcagtcagacagcttttcaagacccttcaaagaaaaccctactccttgccatattcttcaggcactcacaatctattcttattcttagttccatctcatttcatgcttttgcctctacttgtcaaatttctatccaactgttctcttaattcctagaatctccatggtctttcttgttacaggaactttgaattccacactatttgaaattttctcatttcagcttttggtgtggggcaccttatctcctcctttaatgccattctcgttgaaaggttcctctttttgttgttttcctgtttgtcaggtaagagaagactcatcacagagggaaacgatcttgttatttcttttatgagtcatcagcaaataacaatgtgtttgccacataaatatgtatatcagataaaatggatttgcatgattaatattattcttatattgaaactaaatgttgtgttgggttgaatggcagaaataacagggtcaaatctgagcctatatttaactcatttctttagtcatgatagttaaaatttgtttgcaaaatgtaatatgcaaaatggtgttattgaacctcacagctcagttttctctttttatgagattagaccaaataattaaccaacaagccatacttaaatcttaactttaatgagatagaccttgataattaaatgtacttctcctcttcttttaaatatccatattatgacattactgaaatatatactaaattagtagtatgaatccaatttagaaattaagaaattcattttgtattttattttgactattatgccttgctcctaattaattattggccattggtcatatggagattggattttctctctacatttttttctataatatgactttgtattagtgatggtaaagagcactgttttgtgtttggagccttttactggtgggttttgtctctatttggacagcctgaagattcctgcacaggtacaacaacacaattggagttaccagatggaaattatagttaaaaaataaaaatgcagaatagtaacttattaattaatcattgaagtaatttgtaatatttataccaatgcttttattttgttatcaatgaaaatgttcacatactgtcattttaaaagtggcagtccttgcctggcagtaatggcacatgcctttaattccagcacttgggaggcagaggcaggtagatctctgtaagtttaaggccagcctggtctacagagtgagtttcaggacaggtcctaaatctacagagaaaccctgtctaaaccctcctaccaaaaatgtggcaatccctacttgagagaaacacaggcttacaaaactggccagagagatctttaaaattcttgcaatacttctatttctaatagtaaagcattatagtgttccattcatgtcagaccccaagtcttctggggccaaatccctacttaagtttttttcttgaatttctactatctgtgggcattaacagtcttggaagagggaatggcaaagctgtgatgaataccaccggggcagactgtgttcagggattatttctctttctggttctacttcccttcctgcaaacctaaaccagtggtttctagtcccagttggccctgttttctgtcatccgtttcataacaccctctttgctgcactgatatgacatctacagattataaactgattagaagttactgtaaggttaatgaaagtcaggctttgtgtctgtcctcttacatggccttgcaaaggctctgaatcaatcatatatttttataaaatttatacacttgtgttagtcaactttctgctcctatttaaaaacaattcccgagtaatcttaattgaaaaacatgaaacgtttagtttgctcacagtttgtgaggttttagtcagttggtcctgttgtctttgggccttttcacaaggcagatgtctcagcaagcatgcaggccaggggagctgttcacctcatgggtccctaggatgcaaagagagaggaaaagcatggtcctgggacccaacatcccctccaagggcattcctccagtggcctctgaccttgcccttggcccccccagtaccacaggctgtggagcaagcccttcacacagatcttcccatagtcctggctacaattgtctgaaagcactgtcttcccactcagatttccttcaatcatggttcccctcctgttgctgacaggagaaagggtttttcccctttcaggtaaggagacttttagctgaggagctacttagctcagggttagtgtaacagctggtttaattaactttctggtgtagtagtctactctactgcatccaagtgtagacgtgagtcccaggaaaacccttcctcaacaactggggaagcctctcctggcttcacagcacagaggtgaaaggctaaccttcatgctcagagtggtgcatccgccagtgctgggggaaaatcagagcagagaaggaaagacaagggtgaaatatctggcctgacagctaatcccacacacacacaaaaatgtaaacctcaaatttgcctaattttattagcaagatttgagtttttccagcacctaataaaaacacaaggttttctccacaaagaactttttcaataacacaaaatagaaggttataaatacattataatgtttttggctcttgtgatgggaatcgagcatccagaagcaccagaatgcctgggtttgtgagcataagccggcagcactacaaacaataatatcacatgttgaaattgcatttaccctgcactccagctgcaataatggaaaataaacactgatcaatgatgctaggggaatgaattatacttttagcttccctaccaaagtgatattagaaaattactctctaataaagaaccatcaaacaatatgtaggaaaggcatgtagaaaaagaaaactactatagaacagttcatatgagcaacaaattaatttttctggatttcatgtttgtgttaccaggttttgccctttgtagtgtgttgaggtttatttacttgtttcaaataagtagtcattgaaatacctaatattgtatccattgctttctattttaggaagagattcctaaattacataaactgcatgaccctaaagctgggtcaacctctgtgtactacctacaaaaaaatcaaaacaactcaggacttcaatacgaggaagtaaaaaaatgagacaacttcattagaaagtgggaccatgatgagtaagcacacagctggacctcagtgatgcatccaggcgcttagccagagagtccccgtgatctctgtgcccacctcccatcactggggttaatgcggaaacctaaagcgcagtagtatcctatgtcctcttgggtcacgcggcttctgggccttggggcctttcctggcctttcggctcctcatctgtatctctttctaagtggcatttactgtgtgaatcccaggagtttctatttctttcacatatttttgacctcaaaataggtaaccactcaggtcaagacaagaagtgaaaacatcaaagccactaacttgaatgcaaaaactcatcaggtacataacaccaactactgaatgttctttttgagaagactcctgttaaaggtgacaaaaggaagacaaggcagatgcatgtctccttgccctaaaaaaaatctcaaaaagattatgagggattgacaagagggcttagtgaataagagcacttgttcttgcagagggcaagagtgtggttctcagtacccatgttgcagctcacaatccttggtaattttagttttaggtgattcaacaccctcttctggtttccacaggcaccccacttaaatgcgcgcgcgtgtgtgcgcgcgcgcgcgcgcacacacacacacacacacacacacacacacataaaaaatctttaaagaaatgatgggatgaacacaattaaaatgccaccatggcaaccatattgtgtgtctatggattgataaactatgccttggactgatgaaaggaatgtgtaaaacaagaaatggatgaactagactgatgattttctgtctgtgggtgatgagctctggccaacctaaagagttttaagtaggtatgacaaatgcttaggaacaaaatctcgatgtgttgattgaattgacacttctatctgtcaggttatgcatgtgcatggtcctgccaaattccctgagtttaaatcctaagtatttatttggcaactgtaagtccttcaacaaactgcctaacatctctatgatgtaatttcctcattaacaaccacatagtgatggtagaagggacaaagttgataagatgtgttgcatgcttaacctttcccctggtcactagagagggtgtgctgtccacgagccatgcatattatgaggaatcagctttactgtcttctcaacagttcatatccaatattgtatggaccttgattttattgaacatacagaggaagccagcccattggcccttctgtttcctgaatttggaagaagtaggcagtgaatagtctgagttttgatgcttctctttcagacatgttgtgcaagacaatgaagttctggttaaaagctcctcactctgaatccagcttcaaggacacctcacagaacaaaaatcccatcgtttatgcacagccattagagttttatgtctgtactccacaaagtgtaatacaaagtaagtcttctgggagatggcaataggtttaaatctgagcacgagatgctattatgtattaatcacacatgttctcagattcaaaatcctgtggtaagaagtgagattctatatattgtactgattttgttaagcacacatccctccctctttttcggtttcaccatttagctgtcaaaaaccttacagagcataaaagggtttcttagattatttggtgccctgagcttattgatccctttcagaacaatgttttcaaatgcatgctcacaataataataactacaaagaaagccaattagtttaaaatataatttccatgtattaacattttccctgcgcctgaaaacacatgttcttaatgaagataaactgagtacaagaaatgagcagccggaccatccaaacagtggatataaaataaatttggaggacattttgtaaataaggttaaaatgtatccaaactatattaagcatggtaaatgaagttcttatttaatattgattttatttttttatttcttttgagtttttttcttgtttgtttgctcattttagaaatatactctggatataattgtatggtttattctttctgatgtttatattgctagttgtttactttttagagtaaaaattactatgttttttattgaatttcattggttgaaccttctgtttggggttgttggtgcatctaaagcaccttcttcttattactatcacatagttggacacttaagtgtaagctttagatggtgaagcaaataagaatgatctcactaacaaacccacatcttcagactaggcaagcacctctcagggagctgtttggacagtgtgcagacttcagagaaagcccttatagaagctgtgtgagccacagtaaagtgacagcaattcagtcagttttattgaatggcctctatcttagggaaaagaatcccacaaattctcatcaatgtgtaaagcataatctgcctcctccatctctcccaaggtctatgaattcaagcattaccatcccagaacctcaagccaagaccttctccattcctccttagtttccttccaaacaaaaattccttcctgatccttctcttttctcatgaatccagagagtactgagattacttaacattcattgccatgagaaacaaattattgaaaaaagtatcttatatatgtttcttattgccttaacccatcccaaataaatatttctattataattatttagcatataaaattaatgaaggtaatattatgtaactattaaacatttcttacatgctagaagctgtgcaatgtattttatatacaataatttttagttgatcttactatggtctagatatcactgttcctagtttgtaagtaaaatccaactatatagttaatagaagtacctgacttctgctctgtaaatgccaacaatgtgcagctttcaaaaactaaacccctgggctgcaggctggcaatcctttactctatgtctaaaatctacatatgagtgagtacatacaatgcttgtcattttgtgactgggttacctcgctcagaatggtttcttctagttccatccatttacctgcgattccattgcttttttttattctccgctgactaccacattttctctatccattcttcagttgaggggcatctaggctgtttccaggttctggctattacaaataatgctgctatgaacatagttgaacagatgtccttttggtccccagactgatagctgggaaaccagcacgggactgatccagacctcctgaatgtgggtgtcagtgaggagaccttggaaatctatggggcctcttgtagtggatcagtacttatcactaccataggaatggactttaggagcccattccacatggagggatacttcctgagcctagacacaagggggttggcctaggccctatcccaaagaatatgacagactttgaagaccccccccccatggaaggcctcaccctccctggggagcagaaatggtatggaacaggtagggtgttagttgggggggtcaggggaggaggggaaggagaggaacctgggattggcatgtaaaataattttctttctaataaaaagaaggaataaagaagaaaaacattacaaacaaccctaaaagtcaaagaagacaggaagttggtaagaaacatggaaaagaaatctggagttagtttcaaggtatgtgtgcagatatgatcaaataatttaaaattttttaaaataaaaaattaagtgaaaaaaacccactggctattccattaaatctctttcactaaaatgtaagatgatcgcatgttcttgagtcatgttcaatatcagactatattccctaattccatgggtagctggaaatttagaaatatactgtgtggcacagttttatgtttaattcagcagacttcaattgtcttggaggaagacctcatcacgatacatggtgtcccaaccactccagtcatgagatgtgcttaaatatatggttcccacctattccagagagatggcaaatagaaaacctttgaggatgaaatacaatgtagatattcgtttttgtcatcatctccaggatcactggcaatgtcagatcttaatccaacctgaaagaaaccagtgaattagtcagagaaaccctgatgaaacggagagctactgtgcacttaaaggagaaacctgtttgtgttcaatgatcataaaacttaaagtttaccaaagctaggatgtaactaaaattaagatgtctcaatcccgtaagtgagggctcattatctacctcccctgtcatgagccatatctgaacccagtagaggaagagccccagagcctatctgcaacaaaccaatcagatagtagatcacagtgaaccagatggagactctcagactaagcaaatgagatattaagcaggagagtatctgtaactgagaggaatctcagagcctctcacccattgttctccatgatctggagtattcttaaatagagcataataatggctaagaggttgatttcagggttacactttttacatgtttaaaccccaaattctccacttaataggctgcatcaaaacacagattacttaacctttctaagatctattttcccatcaacatacatatggattgcaataaaatctaattgctctaaaccgtaatatctaactcataagatattttttgtgaacagtctcagagtgcctagcactcatcaagggattcaataagtacttattttattctgcagtcctctataccccatgcttctaagttgcaaaccaaatacttgtgcattgaatggcatcttaaggaagcctgtggctttgcttagatccatggtcctcacccaccagattctaggtgtacagctgaaggtacaacaggagcaaatgggtgactataaaattgcccaatttggcacaaccctattattatctctggagaaagccaagcccaggcatagctgatgagctaaccagatacgatgcagaaaacatttccttctcctttttggtttcagcctatttttgaagccatatagctctccggcacagttagcacctgaaggcacagaggcaatggctactgccactggagggtctttcaagctgtggctaacactgctgttcatctgtaagtaccaattcacatcactctccaccccaagggaccaaaatgtatctagagagcttcaggatgggtacattgatggtttttgggtgactttgcaagacatccacaaaccataggagcatttcccagcactgtatagtaaagaggagcagagaaaactggcctgagcatcacctctgtgggaaatcaggataatagcttggatcttttcagtcttctggcatctatagagtacaagacagataccaataaaggaggatggaggaaagaatgcaatgccttctccccattgattattaaaacgttatggatgtgggtttcagtcccatgcagatcccagtcttcttctgtcctgtaaatctggagatagacactaacttaccctttattaattttgcagccctgggtgtcacactaacaggtgagttcatggtccttattccctctgtgtatgtggacattgctctcttcctctgtctgcattccttatgctttcttacaactctgaatttttttcttctcggaaagtgtgctttccagatctaccccttccccatctttgtattcccagccctaggatttcccatataccactttcccctctcaagtcatctcctcttctgcttaagccaacagccatgtctgcactgctgtaagcctctcttctaggactttcacatacactcatccaactctcatgttactaccattattgctattttataattgagaatctcataactcagattacatcacttactgggggactgcacaaccaacaaaaactgggttctgtaagtcccttgggtctgaatacaatttaccttgactatatcatattttgtcatcaccacaagctgctctatagcttctgtttaaattatcatcacatctccttgcccctggaagccattcaaggctgacaccctcttattgctttccacaaaccttgaagattgcaaacttttctcactgtatatattcacaattaaataggtagaaaattagaattaatagtttatcaagcctattatatatttttattttgattaatataatttatttacattgtatactaaaatataccaacacttgctgtagtctgaatggttgacagttgctcctaatatgtttaatgaaactgaggttttaacatttatcctttatttccacattgagccattcaataactatttagcaaatactaactatgaaccaatcattatgataagcaatggttgggtgtgtcaaatattatctctatttaaaaagattgcagttttcatttatggatactgatgtttacatttagagaattagagtaggttataacatcatttaataaattgcttcacttgtttccaaacttcttgtgtttgaatcatatcttcatgcctagatagttgctctctgagaccacataactatttatttcatcctttgttgcttttcttacacatcaagactgagccttgtcacaagatggaccattgtttgactgttgacatgtttgtactcttgagactggatagttttaaaatttctttatctttgcaattttactttctttaagacactcagaaatctgttatgtccttgaacccaccatggattagaatatttacaggagataaagtgactctttcatgccatgggaacaattcccttcaagagaactctactaaatggttccacaatggcatcatctctaaggtgacaacttcacattgggacattacgagtgccaccattcaagacagtggaaaatatgtatgtcagaagcaaggactttacaagagtaaacctgtgtatttagaagtgatgagaggtatgttcttgggatatgggaatacatatctttcacgggaagaataatctactagaacagtggttcccaaacttcctaatgctgcagacctttaatatagtttctcatgttgtggtaatcctaacaataaaatgttgctactgttatgaatcataatataaatatctgtgttttccaatgctcttaggtgacccttgtggaagggtctctccccccaccccccaccccagaggggtcatgacccacaagttgagaaccactacactagacgatggtaggaatgtaggttactctaagagattcagggcttctcactgaagacatctctgtctttcttctgcaccactccttaagtcctctctcttaatcatctattcagtcatcaatataattcctctgctctgtttttttctgtcttacctagatatagacctgtgttctgtgaccaaatggcatgctaggcaaatggacactgcaaagagctctctatgtacattggatcatcatgtttgagtaaagatttgctctgaacaatctggaagccatgaaagattcctctatatgttcctcatgtcctttattgttactaaaacaattctattgtttattttgatacaaatattgcttatttatgactcttttactgccaaaagttaatgcatcatatctagttttcagtaaatgttgaaatagcaaactgtctttcaaatggaaaagttacacaatatatttttcttgagtaaaaagatacattttagcatctataaaccaaattcaaaatacaaactaaaccatgcaaagtagttatttatttcctggtagtagactttagagaagtcctcaaagggtttttcttaaatacaatatgcttgcacaagttagatatattctcattcaaaagtctccatttatgaatgttttacaattcttaaaatggcactagctatagaacacaattcttggaacttgatgaatcattattgacaaataatcattgagtatctacaaactcctaaaccctgtgttagatactactgacaaaacagaactggacacagccctgtatcttgatacatatatctatacagggaaaagaacagtaaataaaaattaggcaaataggtaaaatttaaggaagtattttggacagctatcattaacaacagaactgtgaagcttctgtgaataaagagtacacaaaaataattccttacgttcaaacatttttggaggagaaagtctgtctgctatcgcttaactagatccagctagaacaatctgaaggggattctggtctttgggctttccacatgtgggctcagcagccaactgtatgccattttctggctcctgactgacttttcagagggagaaaagattcactgtataaatttcacgttatacatattattttgtttttgttctttaatttatcttatgaaccaagaagtgggttattggacccccctttaatgagtctgtggatctgtctgcctgctcttctctccctgccccccttcctcaggacacttgtctattgttaagtaaataacaataatgttatgaatgctcttcagattggctgctccttcagacttctgctgatacggtattagacaatgagtcctttgatatcagatgctatggctggaagaactggagtctccacaaggtgatctactataagaatgacctcgctttcaagtacttttatgaaagccccacaatctccattagaaatgccaaacttaatgacagtggcacctatcactgcactggctatcttaggcggctgaactatacatctgagaaattcagaattactgtaataaaaggtaagtggatacagaacaaagtagcccatagcagggaaagagaaagtgtacatgtgagccagtatttgaagttagtacaaggacatctgtcgttgtctagaaaggtcaataaacttgcaacaaggagacccaggacacatcttcacatcagagtccttatttgctaagtgctgatggtaatacctatgcacaagaagaaattttataaagattaatgagatagttttgtcaaatggctttataaactgtcaagtcctgtctgaacataaaagatctcaattagcatttaagaattatctcttgctcctaagaagagtgtttgtatctatcaaattggaagtgacttgggaagctaaagaaacaaggatacaaagagcttagagagtccatattagctgagggtgatggggaaggaaaccaaccccttggtgacctgtgtgtgcaggtcctagaggatgacagtgagcccgctgagggcaggcaggtgggctgcctctatggctcaaaagaaaagctgctcttagcaaacatcatataagaggggaactttgaaatgcttgctttcaaaggaggaaattttgctttatcttggtatgctcataactgtctatcaaaaagcaagttggacaaacttagaattatggtctgatgtttaattatcaccagttccatgctgtgtccttttgtactttcaaatcatcagcatcatgtttccatgactttcactgactagaagaacagttagacagggattatcaggaaacatttattcccctagagtgatctagagaccagactgtggaacccagtatcttgggtgtttgctctctgttcctggataccccgtcaggctaagggtagagaatcatgcttgtgtccctcttaaggaagatggaactctgagccccatttttctgtttcttatctgaattgtataattgttgtatctgtgttccattctagtttacaaaagcaagtaccattggctacaactaattgtcccactgttggtggtgattctgtttgctgtggacacatggttattggtctcaaccgagaaacagttcaaactagtcttgaagattcagaagactggaaaacacaacaaaccttgaaacttaactcctaatctcagcacatacaggaactgatcacattgctgaagagacaattcttaactgtaattttccacagtccttaatagtgtctcatctgtcaaaggccactcatattatccatagaaaagtctgtaccccaggatttgtataaagacttccttaaacccactgtagcttattaagtgatgggtaatagcaaatgctcaataaacaccggtttaatgagttaaagaatgagttgattgttttatttgcatttgtaaaagttaaaagcacaatttgaataaagcaagtatagaatcatgtggcatagtacctttaccaattctggacttcttcgtttgatttttttcttctagaagaaagacccatgaaggcacaaatttaaagtaaccttttcttgtcattataaggaggtagcacagaagacctggtatgatgccggtgaggttggcgatgttttgtattctgccttccattgcttggagcttttgattcttgacaaaaattgaggtgactacaaagcataggaagttcaggccaggattcatatgtgatcaattatagttgcaacttgtatcttatcaccatagaggaacaaggcaaatggcttttgagaaatccaataaatgacaaacattgtctatagtccaggacagcaattctcaacctgtggatcatgacccctttgagtaagtttgaaacaatgaaaatatatcctgcatatcagaaacttgtattatgatccatgacagtaacaaaattataggtatgaaggagcaatgaaaataattttatggttgggggtcatcgcaacatgaggaactatactaaatggttgcagcattatgaaggttgagaaccactggtgaaggacctaatacattttggggtagggaaatatgtttatgttttatctctctcattttattatcaagccattcactgaagtcctgggcctgtcccagagtgtgaattggattaagtttcttccctgcaaagacacccattattagaactaaagtgtacagtataagacatggatcaaaatctttattcttttcccttctaggtttatgatgtgagaaaatctgcttatatatttatgagtcaagtgttacatttctaaagtagtaaggattggcatcatgtccagctcagctcctgcccatgctcatgtagacaatgagttggggcttaagggaaactctaagggacagagtacacactgtcagtgctgaactggagcttatgacagcacatgaaagtagagggcttccagtttgtccagactctgcacctactgacacggtgggaaaggcataagggcaatttgtaaacattgactagacctggaaattccattttgtcaagaaatgttaatggggtttacacagcaattaattcagctttttatagggtgagcatattacatgaccttccttctcacactcctcatttcacccccatttcgtatggtaaggaacgactgcattcctgtcacatggattcatggaaataggtgtggtgaatacagaagagatttcttccggaatgcaggcaggggaaagcccctactggaaactcctgagtgattttatgggaaactttctctgcttcctgtccaaaccttaattcaggataaagcctccagaacacactgttgccaatatacacaatgcagaaacattgtttcacagaattccctacagtgtccgtgcctctggcattgagctagacaggaagtttctcctttgtctcagacttgatcctgatgccaaatactcagagttaggaaccaagatatgcttgatgtgggcaaaaattccaggctagatcagcttgagagacatccaaagagtatataggactcttgcacatcgctgttcacttttgcctcctccatccctagtcaagctcggggtagccatggacagagcagagggatggaagttcaagtggcttctcactgggtgctggactgggccaggccactggcaagtcttcgagattctgtttttctgtgtgagaagggcctggacaaggcagtttcttgtgtctctttaatctcagacacggccactctttattctaggctcaagctcaggagtcatctaccccagggccagggtagattcccttccatgctccatcactgggcaaccagatctgtcattaccttcctgtagtgattgtcatatttaaattcccgggtaatttaagatctgtgtctgccatttctgttttattttttagccttcatgacaattcacaatctactccagaagtaacatagaaaattagcttaacattctaatagttactggtccccaaaatatactctttctaaaagaatctttttaaaaatatacgtaaaatactttgatctatgtcaaagagtatgttatacaggttagtcaaggaattttatttcttgatttatcattttgtcctcctgggtcacctctgatctgcactaaattggtccaggacagagcataaagtaacatttgctctctcaaaataaataatcacaaatccttatgagtttctgatacttaggggatggcagatgaacatctcctggcttgtgacctgaagataaattccaaggatgcctccagaataaagattcagacaaaagatatatcaggagagactgtttgggaactaagtccttagaagaaaggtgaacttctcttcatcaaatgggaaatgaagcacaggtgggcacctctctacacctggagatgcattttcctgctttggaggtcagaaaccctcaagacagcccaagtctatggatggcctcagtctgtcttcctgtcttagatcaccagcccagttctagacagttacttagcaagtccatgcccccatctggtgtttcaaatgccatagtattcccatagtaaagctttagtttactaatactctcagaattgctatcaagttcacctgcatttactacttgcaatacccatattccctcaggtgtagtgtctgtcttgttgatgttcaatacagcaaggagggtggacaaaagcctctctgcaatgtgaggttggaatgaaaagactctgaaattgtagaaaattaaacagaaaaactcagatatttatttcttaacaaaatttcaaaattattgtgtcatggtagatataactcagcacttgtaacagcagtgtactttaaaactgaaagcaaggatctcatccacctctaccaggataaattaaggctaacagttgtgtatttcacaaatgccaactgttctagaagtggaattctaaagtgcagctgcagattgatgaccccaggaaaaagactccaagagagaggcttgaatgcagcacccacatgtatgctgaggtgaaagaagcagggttcaaagagaaatgtgaaacagtcccagcaaaagccctaaatcatctcacagatgacagctctagacaggagatagttcttcatcatcatcatagagaagagacaccatggaatagacaaaccattggaagcagcctatcccccaaacatgataaaaacacagatgcagatccttaacatggaaactgcctgaaggggactcacggagagcctcactccagggttctatgtaacctggagagttcatgtgtggattctgaggtgtaccgtctggaattatatatacatcagcctttggcaaattcatcttcaggcataggatggctgttccactgaccattacatctgtacttcatatctttacttaaactagagtcaacagaattgctaagctagtcttcaaaatttgtcttttaagcaactccattgaaaggagctggcttcaccatttctggaaatctggagatgtagtaaagacatagcactccacattccttctctgtgcatacttcatagtctagtctttcttcctccaaatgatacatgttaacttaaaattatagatcattcatttccataggtgtactctactactgtcaaatggtggatctgatgttcttttcacagtgatatctactaggccctttccataaccattttctttattccagcattgtaaggatggacaaagctaacttttcagtatggtcttcttctgggtctgagttttctcaagtgtgtataataggactgtggatgtcccgtaccttgattctctctgcaggtggtgcagttttactttcttacctctatgataccattcacttcaaagacagacattaagactcttgaaccccccaagtcatcacacagtattaatatgatattcatgaaacagaatataaaaaattatttgacaaaaatatatgtgtttgtatacgaactataccagcagtttagcaacaacagaaatctttcttggccgattgccagaatggagatgtatcagacttagaaacttgatggatattagtgttttaataaatttgaattgatatagtctaccaatgaggatctagtctgagaaataatctggaagtagtttcatcattgtatccatatcacagtgtgtagctacacatcacacacagtaccagttcagggtatacaaccagctgaatggtctctgccattatatatgaagtctatcactgtattaaaagttacttgtcacacatgacagcaactcacaatattctcatggagagtgcagccatttgctcatgtgaacaggtctatacaaaaggtctctggcattgaaccaggtctacatttaaaggaatttggcagggaagtgaaaaggcattagtcaaccatgacacacagttggaccaaagctttcaattaaaagcctgtcaagcctctggctataagtaacccaagtttataatttttctttctacttatattaagtatataaaaatcattatttcatccctctagagcagagcccagaggattctgatggtgtaaaaggaagcctctagattactaaccattagcgtattctggtcttcctgataccacaagtaaaggcataatttgaaacaacttaaaataagtgcctattcacaaaatgaaagaaattaagtttgcaaatgagcctgattaagatgaaagtggctttttccatatggctcggtatagggcgtctttgacttccttgttccgaagggtgtaaactaaagggttcagtagaggggtgataagagtgtaggtcactgagatgagtctgtcctgccccagcaagctctgggacttaggcttcaggtagatgattgcagtgcagccatagtggatgatgaccacagtgaggtgggaggcacaggtggcaaaggctttcttccgaccttctgctgaggcaatcttaagtatggtggagatgatcacaacataggagatgaagaccacacccatgggtagaataagaacacagacactgacaacaaagttgataatctcattgatagtggtatctgtgcaggccagcttcagtaggggtcttacatcacagaagaagtggggaataacaaagccat
